United States Patent Application Publication US 2007/0237770 A1 - sequence listing, part 11

SEQ ID NO: 1126 - DNA, 209612 bp, Mus musculus
  misc_feature (1)...(209612): n = A,T,C or G
cttctgtcctctctgtcccacctccctacccacgtttattcccactctcacccctggtccttgctctgaactgggattcaaagtgtgcagccctgcacctgccttttttatgtgggatctaactcaggtggttattcttgtactgcaagtcctttactgagtaagctgcctccctagcccccaagtctcatgttaggataactgcacagtttcctaggaggcacgcccctccagctaggactgaatgaatttatgtagagacataccttgttggccttcctcactggctgctgtcgaccttggaaaattgcacaattgtgaaagtgttttcttttcataaagccctttctcacctcttccttccctctcaatattctagacttcatttggttgtcttaccacttcttaaaatatttgacaattcttgctaatactctgaaatacttctctcaaagataatttgcataaaaatgttgagagggagaaagaatagtagtttaactacccaaaggcattctatcatcattattttctactctatctaaaaaatacggtgtatatttaagatattcaacatttaaaaattgtgtgtgtacatgtgtgtatgtgtatatgtgtattgtgtgctcatgtgtatatatgtacatatgtgtagtgtgtgtatgtaaaatgacaatatcagcatcattcatcatctaccacctggttttgacacagaatttcacatttgctctttagtacagcaggctagctggcccatgagcctctgcaaattctcttgtcttccactaaatcactaaaacaccactgggattacagatgtctgctacagcatctgactttacgtgatttcgggtcctgaattcagattttcacatttgtttggcatgcactttatccatgaagccatttccccagctaaaatatgatgcacatacagagatatacttgagcaccaggaaagtcaagaaaactagcctactcattgctccaaggcttcccataatgatagcttttgtccattatgataagagctaaaatgtgtcttagcaatctctgtctgctgtacagcatcactactcctgtctttatgccgtaccttagatatcttggctcgttcatcttctatgactccaagtttgttcccttcaatctacttctttccatgtacttctctgtcctctttccattgttagtttcctggaatttctccatttaagaagggtatagttttcataaaaccaaaccaaaccaaaaccaaaacagtaacatggtagagagtcaatcttgttggaacagcccagaggaagttattttccctcaacagaacctctgtagaaaggaaagaatttgcccaagctgactttatggcatttccctgatagcttatgacctctccaatttcagagctttctgtcagcatgggtttctggtctcctttatagatgggattaatgtgtaggagtgtgaactcaagcgtagttattttcctatctcctgaagaagtcattctgtgaagaaatgcttctttaggctaaaacgaagccaaacaaagcgagagctcaaggcaattgataaacaggaatagaatagagtcacagccagtgatgcccgcttctgtcctttcctggtaccagactagactccctttgcctgtgttcaccagtcaagtcctgaaactttcctgacatgcttttccatctatagaaaaggaaggagaaggtatgcaaggcagacacaatagtactcttgttatcctaggttcttttccaaccacaggtcctgacacagaaggtctagggtgggtcccagatgctttattgcttctaccaggtgatactggtgtggtcttgtgagagataagaactcagatcaaagcaccccagactttgttgagagggagacttatctcctgagcctgcctatctatctatctatctatctatctatctatctatctatctatctatctatctatctattgctttctaccccgagggaatcagttacgtgcatctacattagaatctagcaattctacgtttgacacttgtatcaagattctattgcagttgccagctttcaggagttagtatacaagacgagcgtagctctacccggtctgcacattggaaccacttgaaaagatttacaaacaaatactaacgtttggaggttcctttcatgaccaaaccaggaactccacgcatgaggtccagaatgagcaactcttatgctcctcacttgaagctccttgactcaacgtggactcaagactgagacgctgtggtcattgtctctacagacacgtacagttctttatacttgcttttaaccggtaaagtatgcacatgaattcatgtggccaccatgatgtcttgatgcatgtatgcatggtaggatgatcaaatcagtctaatgactgtcaatcacatcaaatatgtgtcttctctttgggataaggacatcaaaactcttctctcttactacatttaaaaagaacagtgctattaactcatcttgcaacaaagcaccggagactacacagtgcctgtgcctacttcctgtgctcttttactcacccttctcctttttgagcctctggacattttttctcttctttctctccaaagtttttcgcatttcttgtggctcccagaaaccattttgaatcaaatatttggattttaagtttctaagcttgagggcaagttgattgtgttgttccacttctatcttagatgaagccaggttatactttcaagccccaaacctttgtagaaatctatctaagcacctgctgatgaacagaattgtagcttctcaaatcccagcctcctggctgacaattatgcctgactcttaggcaccacacaagaaccatatttgtgtatttgagccttctggaagtgacatgtttgcaaacatctcaaagagctggataccaaggaaagttcaatattctggaatccatggctttgcatgctatgaaagtgaggacacacttgagctagactccctgtcaagattggctgctgcttctgcttctgctgctgctgccactgctgccaatgatggccacttagaattctgggaattttccctagccatatcacgctgaagacagtctaggataatcccaccttctagattctaacttgtctcctttactgtgaactagacctttataatcaaatttccttcacccactctgctttaaagctgaaagaaattaaacatttctgggaaataattttaattagaattgctcttgttcttaatatttattaataacaccacatttctcatttgttaaaacaagaaatgtatgacttcaggaagacagtaatatgaacattttgtatacacacagtgttttgcctaatacatatgcaaatttataaaatgggctcaataacttctaacttagctgtgtttatttctcacttgctatttacttgtaatttacctctgcctgagataaatgtgcaggattcagtttgtaggtccaacatgaagaagtgtttttgtttttgttgttgctgttgttctgtgtttgaacacatgggtgctcacacacagcctcctaaacacactccttgctgtctctgcactcacagcacagttggaaaaaaaatcttgcaaatagtacgctataatattgcatgaagattttttgctctaatagtttatgaagattttgcttatattactcattattagtctccataattacccagaggggtgcttataactattgctaatttgtatatgtgaaactgatagtttaattgaaatccccaggttttttgtattactctctcagtaatgttgagactcaatctggacgtggcaaacggatgatcagtaggattttgattgttgtgaacgtttaccagttgatgacttcttacatgagcaatatggaaaatttgttcaattatgctttttaataaaatgttcagaaatgagagtaagagttcttacagttgtcctccataaggccagagtcatatcattaagacccagcaggagggacaggaaatggcatagtctaattactttactctcatagtctaaatggctagtctcaagtttgaagcacaaagacaaacagaagacacatctcccatactgttttaaaagtttatgacagcctttaaaattctctctgagttatctgttctgattggttgggtaagcaaacactaatgggtacctgggaaatatctaactctccatattcagtgctattgatgtaactcagtagatattttaaaaatggatttgaaacaatacaaaacatccattacccaattttggttggaacttccattttcttatccatgaacaagtctgcctccaaacaactaagaggagtaggccctccctgcaggttgctttgggttgtctcgtaattgacctgcttttccatctaaaggagagnnnnnnnnnnnnnnnnnnnnaaaattatttcccagaaatgtttaatttctttcagctttaaagcagagtgggtgaaggaaatttgattataaaggtctagttcacagtaaaggagacaagttagaatctagaaggtgggattatcctagactgtcttcagcgtgatatggctagggaaaattcccagaattctaagtggccatcattggcagcagtggcagcagcagcagaagcagaagcagcagccaatcttgacagggagtctagctcaagtgtgtcctcactttcatagcatgcaaagccatggattccagaatattgaactttccttggtatcccgctagagggggagagggggagaactggataacccccagaatgagtttgactatgtacatacctcagccaggagttagaacttgtggctggtgaatcaggaagatgggaataaggatgcttcctgggttaggtatcagggatgcagcatcagagtgggggtcctgcttttgttgatgggtttgtcatcacatagagatactagtgagtgtgtaaagcacaccaacccctggagggtagcgatagctgccctgctgagctatagtcttcaagatggtccctttgaagagcaggggaaagtggttgagcagcagcagaaagatatggcagagccaaaatggaagaagcagagctatgattctaaacctaagaggtgttttgaaacaggactcttgaggatgtaggttggtcggcaaagccatgggagggttgctttaggcaggctttctactgattcagtcaagtttagcacacttcaaaattgaagcagatgatgaaacagtacacatcatggtgtaagtgttgttaaggaaatgttgcggctgtgtctttgggtgtacacacacttcatgtgcatttcttatcctgtttacaaaaagctgctttctaagcagtttctgggaggagaaaaagcccagctgagcaagcaggatggtttcaaccgtgccttttcttttttaaagcacatggaatccttgttcccaggacattgggaactttctcaatcaataaataatatattatatagcaaatttaaaaggtttttaaattggcaattaaagatatacattctgtatatatttatggtaaataatatattttagtatatgagtgcattgtagagaagctaaatcgagctacttaacacatgtactacatcacatatctttttgttattgagaataaaatctacccccttggggactttcaaatatacaatgtattgctgtaactatggttgccgtggaaactgtagttctctctaacttacaattgctaactagttttgtgtcctttgactacatctgtccagttaccctacccttttggtccccggtaacttaccaccatttttttctctctgttttgtgtgtttcagtttggtactttatatgaatatggaacctatgtaatatgtaaatgcaaaggcaaatgcagtatttgtcattgacttattttacctaatgtgatgcccccaaagctcacccacattgttgccaatgacagggcttcctatttttgaagaatgcatgttattccattataatattattccatatatattattccatatataatacgttctgtttgatctcttgtatattgtttgcaagtagaggatatgtgtgagtgggggggatgtgtgtagtctccactgactgtgctatcgaggaaacagagttgaggttctcctgaagtgtttgataggcaaaggggtacaggaaaagtaagagtaaagagttagcattgacagtgagcgtactttgggattgataaaggaactgacctaaacctaacagtgtgcactttaggaagaagggtcaatatgcttgtactagaaagaggggtgcttataagtctggggttggatttgagatctgatgatgtaagcatctgagctgcctgagttgcatgaagagacatgatatttcaagaagatgagttggtgttggtttgaatatgagactgagaatcaggaagaatcgcagccacacggcctaccgtggctttcagtcaccgagtgcgattagatagatcggagagggcaacctaacctgggctaagagagaaaagaaaatcacttctgactattataattgatgccatgtataaatgaagacaccatgcacttaaagaagaatttatgctttctgactcatctttgcaggaagcagctaatcttcctcatcatgctaactgcgttctctgagggatactgttaactattctcataatgaagacttaactcaaatgccagtgtttttttgttttaaagtgcaccaaagggagaggagtatctatttttttaattaggtattttcttcatttacatttccagtgctatcccaaaagccccccataccccccctcccctacccacccactcccacttcttggccctgtcgttcccctgtactgaggcatataaagtttgcacgaccaatgtgcctctctttccactgatggccgactaggtcatcttctgatacatatgcagctagagacatgagctctggggggtactggttagttcatattgttgttccacctatagggttgcagatccctttagcttcttgggtactttctctagctcctccattggggcccctgtgatccacccaatagcggactgtgagcatccacttctgtgtttgctaggccccggcatagtctcacaagagacagctatatcagggtcctttcagcacaatcttgctagtgtatgcaatggtgtcaacatttggagactaattatgggatggatccccagatatggcagtctttagatggtccatccttttgtctcagctccaaactttgtctctgtaactccttccatggaggagtatctattatccttttgtgttttctaaccttatgtgcagttaagtgttctttaatgtacactaggaagagtttggacaaatgcacacacagacacctcacaatacggaacagttacatctcccagacagttgttgttgttattgttaatttatattatttatttatttcaccccaagtgttgtccccctcctagtcccccctcgccgagttcctccctctccctctcctttggctcggagagggcatcctccctgaatccccacaccctggggcatcaagtcttcctaggattaggtgcatcttctcccactgaagccagatgtggcagcccctcaaaagctattattatttttttctccttcctgtagtccctctactcctttcagaaatcattgtcatgggtagttagcatagacatcaccttaagctccatcacaacagcaatgtaaaaactgctgtgtgaccccctgtcaccactgccattgccaccatagctttgtctgtatttacgtttcatatggatgatctttttttttttttttttctgccaccacgatttttaagttaacctacactgtggcacataccaggcgcttgttccattatagattgaagtggttgtatgaatttgacaccatttaaaatccattctttttattggcagtgtttccagggtttgactacataagtgaatctgatgtgaatggttttctttcctcttttaatgttgcttttccttttgtttatgtgagttttcatttcacttgggtgaacaagtaagatggacttttggggttacagatgtatatttaactttacaagaaattatgctcagaactgctcatagcattttatatttttataacgtcttatatttatatcaaggtccagtggtcccattttcttatcagtgatgctagtattagcctttgcagctactctggcagatgagtgcggggccatcactgtgctgttagtttgtactgtcttcatgtcttgtgagtgggctgtggcacaccttgagacaaccattcaagttatatccccagcgtttcacaggaattctctatatattctgggttgactttagctatccacattgtggatattttctcccagactgttagtctttttttttttttttttttctcaacagtgttcttggatgaggggtttgatttacatcttgatgtgcccaatttatcaatacttttttaaatgttgattgctataagttttatatggtaaacttttgtcttcctcaggactgctaaatcccctcttgtgttttcttctttgctactttatttatgactttcacttttgttatgagatctgtgacctttgtccccttagttttatgtgacttggctccatcaccccatcaactgtccgtactgggagtcttctcaggatggatggctaaaaaagcatctgtaaaggatttgtctttcttctactcatttttggtcatgattgctcccacaaggcatttcccatcacattcccaggtgatgaccctgggcttaatttagtgtctattctctagatcattttgattgttgatttacatattttcttaatatgtaaacttgataagaagaacacagagtatactcttttaacttttattccactctgatacctgactcagaggtccacctttcacacagaaactatcacttagttgaattgcatcattgtttttgggagaactgattctgagttaggatttcaaacctgctgcttacaattttttctatttttagattctacctgaagaggagcccaaaggagattattttaaactatattttaaaagtagactattctttgtacttttaaagttcttttaaagatgtttatttaaaataatttttatttatatgttattatttgaattcattttcactttattatcatgagaccattaacattgttaaagttgcagccaaaaactgttgttttttcaaccttagttaatatccaaatatacattttgaactaattttatgcctaaaacaaacctacttttctgcgtaaaatagagcagcaatataaactacatatatttgctaggttctatgtcacatggagaagtgatagattttaatatttttttgatatttaatagattttgaatgattttatttccaaagaggactctttaatgtttttttttttcagattagatttttcaagatcaagtaatataatgaacaaagaatttgtcccatcaaatcatatttgtattaatagcatttttggaggaacattctcaacttgtctctgttacaacatcaatattcttaatttgtggaaaagagactccagcctatctaataaatgaaaacatgtttggtcatcattactactgaccactaagcacactcttccattagactcttgactgcaaagaggtgccttacagtgggttcagtgggaatttctgtttgtgatataaagcttggggttattgaaggtggggtcattggtcaccatgcttagtggattatgacacatgctatattattgtcttatagaatatagctatttcatctgctcatcttataaaattttccattttgatcacttgaaagacaaaggttgttcaataaagctaagtaattctctctttcttctttagaatcaagtttcttactgggaaatgcccaaattgtggactggcctgtagtttatagtaatgacggtttttgtaaactctctggatatcatcgagctgacgtcatgcagaaaagcagcacctgcaggtaagtggatccaacaactctgaaatcttttccaaatatgaacaagattctgagagtggtgagaggtttgtgtttacttatactcaagacaggataaaattaggtcgaagaagtaaaaaaaaaaagatttaattgtgaacagcaaatatgaattttaggagctgatgctgataactttcgcaaaggagaacttttgcttatatgtgaattaattcactcattaaaattttttggttacctatcataagccaacaggtcgcacagctcctgagtgatgagaggagtagtcagtagtagggagctactgatgacattggtgcctctgaagcaattaaaatagcacctaacaaaacagaaaacctgacctagccaagtggcgcatagttcacaagaacgtaaaggcacaaaaatgaagcctatctattacactgagccaatcatatgcctttatagtgttgatacagtcaatccagctgagccaatcacatgtctttatagtgttgatagagtctatccagctttttgctttgttttatgtgaaacaatttgatattgtattagttatgacaactttaaaaataggccatatctacaagtttatggagaattatgataaagggggatcagaaaacaatcaaaaacaaagaagcctatgtataaggaacttattcaaaatctaaaacttttctatcatatttcagtaaggacagctgggaccctacccccatttcctgctaccacttcagtttttctttcaatttctcacttaactaagtgttggagtcaaattattttggaactgaaaagaatctggtctgttctttctggttcaagttctaagaaaacataggaggtactgtgttaagggacttgcccagagaagtttctgttctctacccacttatactaagatggagggtgtgtgtgtgtgtgtgtgtgtgtgtgtgtgtatgaatgatcttcatcttcatgaagtctatatctgacactacacacagaaaagcctttgcaaaacagattctaacgctcttaaacagatataaccgtagttagcagaaatgggaatgtagggccagcagttggaaagttaagccagaaacttagatgatttcaatgtttgtcaaggcttgagaaacaatctgttcacacttcctctccccgtcctctaccagacacactcattttttcactattgaggttgtccctacattttgtctacactccaaagaatgaagtagaagaatgaatgaagatattgaaactgtggcctgggatggaccacacttttggtagtgtagcactgatatcttttcagcaagggtagacatttgaactttgtgcttaaaaaaaaataaataaaaaacaccattcccccaccatagaccactaagggtgtgttcagtgctctgagatgtggaagattggttttgtgcgacattgtttccatgtgttttcaggaaagtttaggttaggaaaagggaaagctttctggtcagccttatcatgtgggacagcactataatgagcccaacagagcacagacgcttccccatctcttcttcttgaatggtcagtagctcatttgtttgtgccagatgcttttttttcacccaagaagatctataattcctcaagtaaggtatgtttgtcctttatcggattccagatagttcatgtgtgcatctttatttgcaacttcaagttgttttaaatgaacttgccatatttgtgtgtgcatgtgttatgtatgtatatgtatgtgtgtgtaaaatgtgtgtgtaggtttgtgtgtgtgccagtgcctgcatgtgtgtgatatgtattagtatatgtagacataagtggctgtgcttgtacatgtggaggccaggggagagcatcctgtgtcttcctctattgctgttcacccctccctcccctnnnnnnnnnnnnnnnnnnnntccctccctccctccctccctccctccctccctaattacatgcttacatgtaaattaactcacccattaatattctttcttccttccttccttccttccttccttccttccttccttccttccttccttccttccttccttcctttctttctttctttgtttcttgtgacaaggtctttcactgaactagaagcttactatttcagttagggtacctgaccaataagctcctgggctctgcttgtctctgtcctttaacaatggggttacagatgtgggcacctatacctagcacttacacgggagttggggatttgaaatgaggtcctttgtgatcttactcactaaatcatctcaacaactcttatgggggggggggcgtattctgattgctttaattgttttttttagaagactggctattgccttctgaatcgctctccttcccgtgggctctctcccacctctgcagttttgagagagagagagagagagggagacagagagggagacagagagagacagagagagacagagagagagattcactatgtagccctggctgcaccggaactcactctgtagatcaggatgtcctcagactcagggatttacctgcttctgcctctccagtgctgaaattaaaggtgtgcaccaccatgtctagtgctatctggatatctcttaaattttgctttccttcttgtgtcccatatgcttgtcatatcccataatgttttatttggtaaatgtagtgtttttttcctacaggcaaaggattaaaaatgcttgtgcatcatatttatacatcttttattgttctaaaatagttactttctccttcatgttgccagtgtcaggagaagtcccttgaaaattagggattccatcatacttacttaaaaaaatttaatttgttttatatcatttatttattcttccatccatcgttcggtctgccggcctatgtgcctatctctgtctgtctgtctgtctgtctatctatctatctatctatctatctatctatctatctatctatctgcttatctaattattttgtgtgtatgtgttatgtgtcatggcatgattatggaggtcaaggtacaacatgtgaaagttggctccctacttccaccatgtaagctccgggaattgaacttatgcagccaggcttagcatgtgacctttctcactgagttgtctcaccagctcacactcacttttgaatgcactatgtacacaatacaagagtgtttattatctgtctttgttaaattatattgttttgctttgcagtaaattctagcataggtctcccatgttcctgcagagcatgcttttatttatggcatgtcaccccgagtgttaaagcgtttcaagaaatttgggatgatttggactttcccattgcgagcatgtcttccctcaggtctcctgcacctctgagagacaatctttcagaaatggctgcattttgaataaacagcctttatgcacttatacactaaatatgaagtgtgttttgcttatctaaaaactgcagccatttaaggcctgttcagagtagctgatgaaggaacagactatacctcagccctgacagctttcattggaagtatgattgtgtaaacaccattccattttgaattttctctttccattttaaataacagacaaacaaagaaaaactttacccattttgggtggactgcaccattaagagtgaagaccaagaaataatcagaatattgagttgtaggaaatttgtttaaaactattatcacgaagtcctaacttcctaaaccacatatgttgagagcacaacagtgaacaaagcaaataacaaatttcaagacaaaaagaagaccacaaccaaacaacccatatatgtattagacaggatctgtgctgtgagtctaatttttcacaacatgcagttttctctccctatttcttgagtaattttataaaatcatttggacatgagatgcaaggagacagaggaaggggagaagaaaattacacccagatttagaaacataaggttggtgttaaaggtcactacattatcggcagtgattccagaatcattgaattaaatgtgttgatcagtcacttcgcacagccaaggctttgaaaagaaatcaaactattttactggtttctggatctgtgcaattctttttactaatctttaaagttagcatacaaaggaaaggggttcattatgacattttcacaggtactgtactttcactgtactttgttatctttctgtctatctgtctatctatttatctatctatctatctatctatctatctatctatctatctatctatctatcaatctatccatttatccgcccacccacccacccattcatttagtttttacttattcactttatattctgctcactgacctcctcccattcacctcctcctataatccttccctccatcccacccctcttctcctgagagcagctgagctctcctggatatctccccaccttggcacatcaagtctctgggggggggtaggcacatcccctcccactgaggccagacaaggcagcccagctagaagaacacagcccaggaacagccaacagcttttggtatgtccccccctctagttgtttggaacccacatgaagaccaagctgcacatctactatgtaactgcagtgaggcctatgtccagaccatgtatgctctttggttggtggttcagtctctgagagccccaagaggccaggttagtttactctgttggtctttctgtggagttcctatcccctttggggcctgcagtccttcaccctgttcttccatgagagttcccaagctctgtcaactgtttccctgtggatgtctacattggtttgagtcagctgctgggtggaggacagccatgctagattcctttgtgcttgcctatgagatgggtctcaagttgggctgattattgtttggccattccctcagtccctgctccattccccttccctttattctttatcttcctctcccgttgtcttccctcacctccccagctcctcctctctggtccttttcctcagacagtcctccctctgatttcaggtcacaggtattctgttactctcctttctatcacctctctgttcagcgcaagaaaagaattgataataaaacagtatcactaaatctggaaaggaagatgacataaaatttctttccaatgatgcaattcatcagaagagtgggtcttgaggccatcagcaaaaacagtacaatatgtagggtctaaacatgtttttttttttttttttactgattttactgattacttttattcaaatgtatgaaaataagaagtcagtgactcacagatcagtgagtctcagctatgacactgtgtagcagagaaaaggaaccgcgtggtgtgcgttatttgattatttgaattgaagtcagtaggattaggatgatgatgagaaaaatagtggcctatcataattttaaaacactcaaatgtaaattgctctataggaaaactcttttaagaatgtcaaattattattattattattttggtgtttatccaatatcaagagacagatttgtttcatttgccttctaaagtttttttttttttcatctattgcccaacttctcctgcactgaactgaatcaaaataaacacagttctcggcttgtctgagtgtctttcctttttcaaaggcttcctttcatccgcccctcgtgcttgtcttcttcctaagctttgcctcggatgttcatggtgttttcctgcgagtagcatccctactcatttgattcttgagctggagttgctttcgatatgtccgttcctaagagcttcaggcttgcactatgaagcactattggttacgaagcactattggtgattctgactatcttcttccaccattatgacttggagacctctttaagcttctatgtcacattccacttcattgggattgactgcagttgagtgactgtcacagcctttctttcagttatccattcaatccatgacattcaatttcccatactttacatctcaaactaattggagatgagcaaccttatatacatcacagttttgtgtgggagaaatactttatctttgagccagaaagcatatggaaggaggcagtatagtatgcagattctgtaagggacccctcacatttgctgcctagagagcccgtataacttcacagtcctcagtcatagctgaggcttctggtttctacctccttgttgttccctaacacacaacactcttttacttttgttttcaccagagtaaaacaaaaaattattctatgacatatcaggattccaaggaatttccaacttattttgttttataatttagtaattgaatttccaagcatcagattgtttgctgtatattggtggatacaaaaagtattggttgttcaaaggatgataggttttaggggaggaagttctggcattcaaaacctgctgtcagggcttaggtggggaccactacagcctccatttctcattagcctgaaactttggagaaatctgttctgcttttgtttctgggatagtggggcagaagagcagttgtgtaggctaggtgggggggggggtgcttgaggagcagcagatattttcaaaactactgccatccattggaaagccattcctaatcctaacccaagtcatcatttgacatcatagacagcaaagcagagatattaagtagactgtgagattccaccagctcttatgcacacaagagtgcagtggacatgagggatggaagtcagtgcattctgttgacggatgaccctgcttctcactgagccactgaggaaaattgtagaagggaaactgtaggggtatctagtactattctgattttccttaattacctgccatggatctaacatttaggactctgtctaaattctttgaagggaatatacataaatgggttgtagaaacctttttgttaggacagactgtataaagcaaaagccttcaaattctttttaaatgacttctttcagatgccaaagatgttgattttgtttgagtttttagcttccccacttagcgctctctctctctctctctctctctctctctctctctctctctctctctctctcagagctcttttgttttcttcttctttgactacatatctcagtttatgctccaccctgactctgcagttgcaaccatttccaagctgaaccccaatgcttactcacagcataactcactctgttggttctttggtgagacgtttgttgggatgtagattggtctgcacacacagacctttgtgagtagtgcctgtatgtttgtgatgcatttgtctagggccatttctgccaaaggaaaagcaagaccagttgatggagcccgtgattaggttatttatttctttacttttagagttacaaagttctgtcctctgttggaagtctatcaatcttacagttatcttggttgttaaatacaatgagaactgtttacaagatttccagaagagaagacaggatgcaagaataaagagcttctgctatgagctaaagccacatatctcaaagatgtgcttagactgatatagatagaagataagcagatgctgagtcaaacctggtcaagcctggaatagttctgaagagaattttccccctctagtcaaagcttaaatatttttcccaatttttttattagatattttgtttatttacatttcaaatgctatccctaaagtcctccataccctccccctgccccctccctgctctcctacccacccactcccacttcttggccctggtgttcccctgtcctggggcatatacagttggtaagaccaaggggcctctctttccactgatggccgactaggtcatcttttgctacatatgcagttagagacataagctctgggggtactggttagttcatattgttgttccacctatagggttgcagacccctttagctcctagggtactttctctagctcctccattgggggccctgtgttccatccaatagctgactgtaagcatacacttctgtgtttgccaggcactggcatagcctcacaagagacagctatatcagggtcctttcagcaaaatcttgctggtgtatgcaatggtgtctatatttggaggctgattatgggatggatctccaggtgcagcagtctctagatggtccatcctttcgtctcagctccaaactttgtctctgtaattacttccatgggtgttttgttcccaattctaagaaggggtgaagtatccacactttggtcttcgttcttcttgagtttcatgtgttttgcaaattgtatcttgggtattctaagtttctgggttaatatccacttaccagtgagtacatatcatgtgagttcttttgtgattgggttacctcacaggatgatatcctccaggtccatccatttgcctaggaatttcataaattcattctttttaatagctgagtagtactccattgtgtaaatgtaccccattttggaaaaaagacagcatattcaacaaatggtgctggcacaaatggaggtcatcctgtagaagaatgcaaattgatccattcttatcaccttgtactaaggtcaagtctaagtggatcaaggaactccacataaaaccagagacactgaaatttatagaggagaaagtggggaaaagcctcgaagatttaggcacaggggaaaaattcctgaagcaatggcttgttctgtaagatagagaatcgacaaaagagacctcataaaattgcaaagcttctgtaaggaaaagacactgtcaataagacaaaaaggtcaccaacagattgggaaaggatctttacctatcctaaatcagataggggactaatatccaatatatacaaagtttaaatcttatccctgtgttcaaatcttatttaggagcaggctgggctaggatgtttgcttcaccctcatgggtttacatgagaggaagtcacagaacactgtgtgtctccctgttagctgtagtgactccatcttttagtaaacatgatctgatttgcatccttggatgtgggaaagcaaagaaggagagctgagctgtgggttttccagccatcacatgacctgttacaattcatgattccatgagtattatccttttaatctttacctctgaactattagcactattatcattttgatcagagaggagaggtctgatgactctctcagcaagtatagttttacaggtggctgtctaagtgcaggtgtccactggtataacggctcttggtaccacaggagagatgggtcactgctgtgagaacaattccattttccttccaatgaaataaagtagaagtcagttgtaattcctaaagggcagtttaacattctgtatgagcagaagttatgtagcataattgctacttctaaagtgtgagtccctttaaattccattaaccattggctgactgcattggattttgtcattctaagtcagggcttgaaaaattgtgacaaaatggtcagcacctgcaagcaaaatgagcaagcacacaatcatgccctatccacatagcgatgtagcattgtctgtcagtatgatttgggcaaactttagcagaaatagctatgtatgtatgtatgtatgtatgtatgtatgtatgtatgtatgtatgattgtaatttattacatttttatttattatattagttattaattgtgattaaagtggaaggatgtctcttaatgtttttgaatttctgatagccagtggcattgaactcttattttttcttcacgtagctgtggagtcatgtatttctttgcttgaacaaacaaattcaggtaatttgttcatttccaatttgattcgattcttggttgagcattttaaattctttatgtgttctgaatgtaatctcttgtcagatggaagcagttcaggttctatagctcccatcactgttggcttgcagggatttctaccgttcctcttgttgcctctgctttacagagcctcacccaggccattgcctgtgtcaaggtcttcaagtgtctctgctctgacttccagttgtttcacagtctcaggcttcaagcttagtgcttacaaactgttttctgttgatttgggcataggctgggagaaagaaatgaagtttggttcttctgcatatgcatattgaggttccccaggtttttttttttaattaggtacccaggtttgtttattgtgtatactctctaatgtatttgtgtgtgtgtatgtgtgtgtgtgtgtgtgtgtgtgtgagtgagcatgtgtgcacataactcagtgagtgagtgattgtatgactgtataagtgtgtataagtgtgtatgtctgtgtgtgtgcatgtgcatgagtgagtatggtgtgtgtgtgtgtgtgtgtgtgtgtgtgtgcacatgtacatgagtgagcatgtatgcatgtgcctcagtgagtgagtgagtgattgtgtgagtagttatgtgattgtgtaagtatgtgggtgtgtgagtgtgtgtgtgtgtgtgtatatgtgagtgttttagctcccttgggtatagacattttctatagatatatgaacttatttctgaagtctctactctggtcccccggtgtgcatgtcagaatttatgtagtacctatgttgttgtggctactgctgtcctgtagtgtatattacaacctctcattgtatttggctccagcttttgatttttttttaattctcaagatgcttttaaatcatggggtatagtgtgctttcttatgaattagaggaaaattttgtttctgttagaatggcagaattgtgatagaagcttcaagacagttctatattttgttgagtcatatggacatcatagcaggattaattgctttaattcacacacatgtaagatctttccatctgagcatgtatatcttccaacagttattcatctgccttttacagtttccattgtagaggtcatttattctctgagattaatttgctcccaggtatttgatattttcaacagctattataaatgagcttgctttatgattcttttctcagcaagttcattatagcacataaaattactcatatttctatattgggtttatttcctgaaactaccaaatttggctatcagacctgataatcttctgatggtgtctttcaattatggtttctaaacaggataatctgattctctttttgtctggatatcatatttctttcctttatccaattgctctgactaagaatgtgccgtgctctgtggatcacgtgagctgcatgtgttatccagattttataggaaacagtttcaatttttccctcccaactcactatgattttgctctgagaccattgtgtgtggactttttatgttgagttcatttgttctctttcgttgtttatctcggatgcttctttgatgaatgttgatgagagcgctggatgatcggtccattgatggaaatgagatgttgatgtccacagcagtcgctatagtataacctctttctttagatataacaatatttatttatttttttttgcacattgagtattttattgtattttattttttccgagacagggtttctctgtgtagccctggctgtcctgagactcactctgtagaccaggctggccttgaactcagaaatctgccttcctctgcctcccaagtgctgggattaaaggcgtgcaccaccgccgccaccaccactgcccagctttattttaatttttgagacagggttactctatgtaatccctttatgagatattctagcattagttagaagtacatgttacatcccccactgagtggattcccctcattagcccatagataccacctctctgtgactttctaccatttttgatttaaggtctgcttgctaagtatagccattgttgctcgctcacatgctccatctcagcccgtgtctgtaacttactgtgaaacagtaagttagttctacttgtaagcagcacattgttgggtcctgccttttacttcacttaggcaatatttttttttcctttggggcttctgatgtgtttgcatccaaggttattagcattatgtatagaactatttgtgtcattttctttgttttctggtttcaaatggccatgttgtagtctttggctctgggctttatctctgttgttttctgtgtgagtgagattcgattctttctaacttttatgtaactgctcttctagagagttttagtcttttgcatcttctcagagtggtacccatcattatttgctctttcactttcaggtgtggcttcccttgagcatcatcccgttaagggtgctttagcaatgatggattctctaatttttcctttggactttggtctcgtacattgtttagctcacctttgttctcccataacatttctcagagcaatagtcgaagttaacaatttttcccttctaacatttaatatggtgtcatattcccttacagtctattagttttctgctgagaaatctcccataaatttaatagtggtgaccttaaatgtgagtgaatgcttttatgtttttagaatctggaagtttggctgtgaaatgcaacagctaggatgtgtttgagtcaaatctatttcttgggctttctgggtctcctctgtgtctgtaactctccaagattaaggaaattatcagctttttctttgtcactatggaagtttcattttctattttctttattaagataaggtctcatgtagcccagcatggctttgaactcactatgtaaccaagggtgacctcaaacttctgatccttccgtttctgccctttgcttctggagtaccagataatgtgccaccatgtcctgttttacgcagtgctgggagaacaaagccagggctttatccattctagggacacattctactaactgagccacattccccatctctaactggaagtcacctaagactgaaagtcatcatattcttgagctacagcactcctggataagcacccagaggactctgaacccaccactgagagactcacccatccatgaatgttgatacaccactcaccatagctgagtaatgaaactattctcaatgtctactgatagatgaatgggtaaagaatgtgttacttatattcaatgggatcttagtcagccgtaaagaaaaatgaaatcatggcatattcaggaaaatggatgggtctgggactcatttgttatgggaatgggctttctgttctttactttccttccttacctcccggaagcttcataatttggccatttattcacttacacatgtctcataagtcttagaaactttctttgttctttctaatgatctttctcttttatttctgcggtgtaatagtggtactccaaaagctctgtctttaggttcagacatttttctgcttgatctagcttgttcttgaggctctggttcatctcttttatttgacttttttcatttttcatgtccgaggtttagaattggttccttttgatgaattcttactcatttcattaattgattttcctgtttcaaagaattatttaaattatcttgtatgtcattgattgtccttggaatcattcttttgagttcttgctcaggcaatttttcctattttcctttccctggagtcttgttggagaacaattgcactctttttgatctatcctgttaccttgcagtttcatactccatgtttcctcctgctgacatttgcatttctaggggatcagttctattgtaagtggtgcagcaatgtccatggatgggcaagtatctcagtggtggatttagagtcctctggtgcatagtaggagtgatgtagctcaggaatatggtgattttcagtcttagataacctccgtactagagatggggaatgtgcctccactactgagtgattttcatatttgaagaatttctttcctttcctttcctttcctttcctttcctttcctttcctttcctttcctttcctttcctttcctttcctttcctttcctttccttttccgttagactatattggctttggttcaagttgacccttacagctatggtctccaaacaacttcttcaattgcaataaatggctgtgagcacaattcactggaagcagggcatgaagcctgttgttctctgcagggctgccaggtggggctattctagcagccaaggagggtatggtacacagagcagtggaggaaaggtgcttacctagtggagtcaggcaacatttgtgtaatgtagcacaggaacaaaatgtgaggaccttgtgtcaatttttgtggaccatgttccagtgaacccaggctagaaggtccctgggcatgtgtggtatggttcccatggtaaagggagcaaggctcgtgtgtagtacagagtgcatctgttaagcctccagtgatggtatgtaggtggagccatccttggagagagtgtgcttcatgaccacagctcctcagtcatctaaagcagtgtaataggatgccctccccaaagactcagtgagacttcaagattgctcggcagcaaaaattcagggtgtcagtgttagctgttaaggggtctcctgtgtatcttttcattgtggtagaacgttccaaatataaactggtcttgccctgggaaatggggcagttgataataggctttggaccctgttttactcaaatgtctgccctcgtgccccacagtacttctgtttcatctgctctgcattccatctctttctggtgagtgaatacgctgtttgaatagtatctgttcttcccctgccccttcagctcttcctttctttagagccacttctgttgccactagctagccatcttgttgttggctttcttctaccattaacaatggaaagcctttatggcaagtagaggcttgctccttgatcctgtgtttactttatatgttctagccatatctaaaacatgtatctgtcccagacaccagcttaggaattcttctaggggtcacacttgtttatgagccatttttcttgtttgtgttgattgaaatttctctgaaagtgtaaaatctttcaactggtataccaatttcttatggtctcttctgacttcacttactttcaactgttcacaattattatctttcttttggggggggtggaatttagtatttgttgattaatctctacttcctattgtccatttttaaaatgttgcatggaagtaacatgaggagagaaaagaaaggaagcacagttatgtggtacaccatttgtatgaactaaatatacaatgcagcagttatcgatactgacaggctctgaaggacatgatgtgactgtttgcatctctagataggcagctattattgatgataattcccctttgtccttaggggatatgttctggggcccagggcattctggaaatagtgataagtgcaaatactgcacacctgttttctcctatacatccaaatcatgatgtttcattcataaactagagatagtaagattttagcaataataataataataatcacaaagaacaattataataatccattggattgggatgtgaccactctaaaatacatctttttttcttcgtacctttacttttcaactaatgaagtatcttatgacttctctttggaaaaacctgaatttgcagagtcattattattgtatttggggcccattattaagtaaaataatggttgctagaatatacacactgccgaactaaagtggctgatttgctaaccgagagtgagactgtctgggtagcatgtagagtgtatagactcgtgtagaatttgaatatcctgatcagggcatggggttcacatcactgtggtagatgaagcagggtggcaagaactttcacgtttagaatgatagacgactttcaacgtttgagttgtgtattctagaatttgtcattttatagtttttgatcatgcttgaccatttgaaactggagaaagcacaatattcgataaggggatgtgactggaccagtaactaaagtctctactgatgtgaaacatactgaaaagaatcatggtaattgaaattactatggtagtgcatggtagtgcatatggaaaccatttataaccaggaagtactctctctctctctgcctctctgctttgctatgtaagtaaagataactatcagcaggaagttttagcagcagtgattaaaacatggcttaatattttactgtctttacatatcctactacagatcacaaatttctagtgctacccaataagatttgcataaataatggcttgcatattttgagttcattgtgtggggacatcgtttaaggcaaaatgaaatccttaatcatagacaatggtgtgattgatctgtgacacagaaatgaaacaggcttttctcttccagttttatgtatggagaactgaccgacaagaagaccattgagaaagtcaggcagacttttgacaactacgagtcaaactgttttgaagttcttctgtacaaaaaaaaccgtaggtatttttgttaccaataagatgacctaggtctttctaaattttagtttgggaagtggtagctaagcaacaaggtagagaagattacaatgcttcattactgctcttggtgttgggggagaggttgctggtgaaattagattgaaaaattaatgatggttttacccttgaaaagatcctcttgaagaatggaaacaaacatggtgtgtttcattctactttcacaaattaattttaatttttagttagtgaaaaatatattatatggatgaatgttttgcttgcatgtgtgcatgtgtaccatgtgcgtgcctggtgcctgccaaggtcagacggtatcaggtctcctgggactggatcacagatggttgtgagccaccatgtggatgttggtaactgaactcagatcttctgcaaaggcaaaggagctcttaactgctaagccatctctccagtcccacattgttattttaaacattacagtgtttcatatttattggatacaaagtgaccctattacttaggagtgctatgtgaatacttaaatcaaacaaggaacactcaacatttcaaatatttactttttgtgataagaatattggaaattgctctcttggcaactctggtgtctgcagtttgctgttattattcaccgtattcatcatgctgtgcaatacatctcacacctagacatcgtgctgtgtacgatgatttttttattcctttaacattgttgcaaataccacaaactctctctccccccactctgtgtgtgcatgtgtgtattgtatatgcatgtgtatacgtgtatatatatttgtgtattgtataggtatgtatatggggtacacagattgtggaggccagtggaggacattagatgtcttcctccctttcctcctgtattccctggagaccagatctcttacttgagtttcttactttccaggtagactaactagtctgtgaaccgcagtcatccttctgtctctgtcttttccttttctcccagtgctgtggtgattcacacacagagccgtgcttggctttttgtgtgggatccatgcaggtccttatgcttgctcagcagacattcctacccactgagccatctccccagcccaagaaattcttttaaagacggaacagtattcacttcatatacgtacttcattgttttatccatttatgtattgatggacattcagatcaataataaattggttcctgtgaattgtagtgcaatgaatgcaagtgtgcatgttttgtagatttcaaatcttttgggtaaatacccagctgtgggactgttacaccatatggtggctttgttttaaaaattttaaattaattccagagtagggttttttgtagtgtctgtgctaatgtatgttcataaatacattattagaggagtcccttcttgcggttactacacaaatatcagtgaggtggatatatggttatttgttgtcagtctttacaaatatatgctttacatagacttgaactgtttcctgtttaagcgtgatgggcataggcgttatccccaggacaggacagtcacatctggtaaatatctgctgatattgtgaattgttctctaggattagaattgtacacagtctgttgctacttatttcatcacatagaacctcatggtacagcccctatttgggaaaaataaccaaccaacgaaccagccaaccaccactacatgcacatcctcaacaatcaagtcttctatttaacttgatggctcctttgcatggtcccatgaactttgtttctttttgctgctttctcaaatgtcttcctcctcctccttctcttctccttcttttctttcttcttcctcttcttccttcttctccttcttcttcttcttgatatgtagagtcccttcatagtccttaatcaagaagccatctctaaatgacatctgaatgcaaaggaagaactattttctccaatgtagtctctcactgggtatattgactacacttaggacaaggcccatgctctgcagtagatggcctacatgaaacannnnnnnnnnnnnnnnnnnnnnnnnnnnnnnnnnnnnnnnnnnnnnnnnnnnnnnnnnnnnnnnnnnnnnnnnnnnnnnnnnnnnnnnnnnnnnnnnnnnnnnnnnnnnnnnnnnnnngggtgggtatgaaggtggggtgggtatgaaggtggggtgggtatgaaggtggggtgggtatgaaaggtggggagaagctgagaagagttgggagaagagaaactgagatcagaatatattgtaagaagaatttatttccaataaacatctatatgtgtatgtgtgtatgtgtgtgcatatgctttcatgttaagtgacagcagtaactatatacatcttcagtggttgctatggtttttttaagtgtgggagacatcctcagtagaacatgctggttctaggttcgttgtatgttggatttcatggtgcgcagtttatccttccctttccttcgatctgttattctttatggaatacatggaattaaaatcagattttcttttttatcactagacccacgaaaggataacagcccccatggacattgcttcacagaagtgcatttggcaatggaatcattttctggttttacttatcgaaacgttcaacaatttatcttgaatttttagaaccaaggccaaaaagatatttctgtctgaagtcacactcagctgccagtgtgtcacacagaaagccatcagttctgaatgatcagttcttcctgctacgcaggctatacacattttcttggtcttcccttcaggctcaaatatttatttatgattcataggatgctcaaatgcccaagctcccttcattttcacagagatatttctagtctttagatgacttagatatatggcccaagtttagcaaataattgaagatgacttaccctcacatttaagtagaattaacaaatatttgctcaattttcagactttgtagccaagtccatagtttgagggtgtcaaaactacttcaatgggattctatttttttaaatttatttttaaacatatggaaaataatttgaaatttacatttttacaattctccttctaggatagttatggtttgaaatgatgtgacttttgttcacctctgcccgatctctttaaaaaaattttttttattaggtatttttctcatttatatttccaatgctatcccaaaagtcccccataccctcccccctcaactcccctaaccacctactcccacttcttggccctggcgttcccctgtactgaggcatataaagtttgcacgcccaatgggcctctctttccactgatggccgaccaggccatcttttggtacatatgcagctagagtcaagagctccggggtactggttaattcataatgttgttccatctatagggttgcagttccctttagctccttgggtactttctctagctcctccaatgggagccctgtgatccatccaatagttgactgtgagcatccacttctgtgtttgctaggccccggcatagtctcacaagagacagctatatcagggtcctttcagcaaaatcttgctatgtatgcaatggtgtcagagtttggaggccgaatatgggatggatccctggatatggcagtctctagatggtccatcctttcgtctcagctccaaactttgtctctgtaactccttccatgggtgttttgttcccaattctaagaagtctgcccgatctcttaagggaactgagtattgctatatgaacatctgtatacagctggtaggagacaggccctgctaccctgtagaaagctcctgttctcccctgtgtgctctttgcatctgtctttaattttgattttcctttaataagaaggatgagtattatcaatgcattagggtagaacacaagcattttagccagatttaaaggaatctcacaagtggtcatctcaaacagcttttacacatcaactacaaaaagagtgttgtgtgactttgaaaaatgttagatggggaaattgatatatcttctgaaggctggggaatgcctgaatgccaatccttgtccccaagactttcatcacataattaagttacagtaaacagcattttgcaaatggggcagttgaagtttctgatttactcagtcaaggttgacatttcagcttgtaacctttttaaaatttcttcccatttagtgtcctattaaaaggaggcatttcctattctggggaaagtttatctttggggacaaagacagaatctgtctatgttgctagtgcccagtgcccacgcctggtgcccaagccctgctctgggtgttgggaagaatacactctgtccatccatctcagactccttgtctgagcccattctggggaaagtctgagcctatgagctgaaaaaaattctaccttgatatttggaaacagcttttcagacagccctgtctctgccagaattccaaagtggctgtttcggtaggaaggcatgactgtggcatcagctcttcttgtccagatttctagcaggcccaggaaaaagaaaaggattttcaatgctttttttctttgtttataaccctctctacctctagctcaccaagttggaacagccacaggccatgaacacagcagtgtctggcagtggttatttgtaaaactgtatatcactcacagttcccagacacgctgtgtaagacgagagcaggaaacagggaggaagcctggctgggagatgatgggtttgtttccaagtttccttctcattctgcaatcatctcagaaagggctgtgtcctcctatggacctgttagagccacagagcctcaatggccggagttgaacattatcttataaatctctctgcagtggtctgggttctggagcctgctgagggactcaactcatctggtgtaaatggcaagttagcccttccatgacttaggtagattcctcaggtttagcaggtaatttaagagcactattattacagtgaccatttagacagaattgacagtggcattaggtgacccaggtttggatccaggtatgaaggaggttgttacttggttttcatgggggaccactaagatgctctaacttctcagctgcatcagctacacataacctcttctgcccctaagcatggacgatttgggggcttttattgctcttttgcttgataaaaatctgatggaaaatgaacttatttacttactatgtttttttattgtgatagaatgttctttcagtgtgctgctgctgtgtggataattattcccttgaggtatttttcatgccttcatctagtccattgttgcaatttatttgtcaattccgaggtctgtccagaccctgagctttaaaactgtgaaaccctcatccctctggagagcgcagtagctgtttcttgaagaatgatgtggcgcagttgagcctccaggggcaggaggcagtggctcattaagacaccggagattcttaagccctgaacacacatgctgctttactttacctttgatgattgccctaaaagtttcaggtagcactcagtgtacagtaagtatcaagtattggtgatgtctcctgtgaccaaggacacagccatcaaagcgtcacctaagtccaccccatggaagagagggccttgggacagaagcagcgtttgagatgctcttctgggagtcaagtttgtcagggtggtaggtgttgctgctgcagctaattggaaactcttgtcaaggtgacaagaccagagaagcatgtgggagtgatcacacttgatgagtttgtcagaggccccaggacacagacctaaaggtgatgctggtataactttcggagcaagactgcctttgtgtgcacaagttgggaagagatcctgtacttttccttaaaatgttcatatttggggctaaaaatacactcattaagtctgaacaattggtagctgatagagagttaaacagttttcttttgttgctttagattgagatttaattcaaggccttatgcatacaagatagcatacatatgcatacattccatcagtgaactacatccccagctcttgttaaatttttaattttgttctcaattatttatgagacagagtatttctaagttgcccagtaaactctttagctcactttgtagtagagaccattcttgaatctgtgatcctcctgcctcagcctcctcagtatatataaagcctgattataggcctgaaccagcagctctggttaaagcattgtttttagtattgtaacaaaactgctgttttggtgctgaagtaagggaagagatggtagagtcatggaagctaacccttgctgtggccctgacacccctctgtcctctttctccctctttctcccctacaggtacccctgtttggttttacatgcaaatcgcaccaataagaaatgaacacgagaaggtggtcttgttcctgtgtacattcaaggacattacactgttcaaacagcctatagaggatgactcaacgaaaggtaaggtccaaaacagagtttttgtacctaagaattcggtggccttttatctgcctctttctcctccttctcctcctcctcttaaaacaccaaatctatgtcacatccacatataataacctaactttaagttgaaatatatcattaataaagcatgtcttctgacaacttaagtattaacaattaaaataagtccaactggaataaaataaatacattaacaaaaatccaatgaattgtacctattatcacatgtatggctgcctcaaagccagtagtatcccaggagctaatactgatagcaagaattcactgtgaagtacaaagggctgatgacagacagacagacagacaaagaaaaactggaatttttatgcattcagaaaatgtagctagagaaatctgaaagcctgccaaatttcagcattacacacattgacttgctttctaatagatttggtgatgtttttaaaatccaggtttaattttgccccctattatatataaccacatcccgggcaagatgtacatctattgtctccatgagcttcctgtacaggcacagcacttaggcaaagattgagtcaattatcttacaaatgtgttaatcttcaaaaataggcaataaaagtgcagaacctaaagaacagtctagatcgtgttcatatggctcagcttgtggatgggaacaggtacatgttcctgatatagaaacacttctgcaagagcagacacatctcaacccaggtctccattcaacataggagataagtcttctcctaaggcccctcatagtgcacagtggaagtgggaggaagttggggttcttggagctcttcacccttttgtccaatcaagggggatagggcaagaaaaatgggtggtgcaaatttatttttgaaacagtttcttaataaaatattttgagtttgctagacccatggactgttgagtaaactcagacatcaaatgctgagttagctagctggtggctgtcctcccttcatcccaaactgcctgtgtactgaggaaaccaccctgactgtgaaataaaaaatgggagacacgggtgtctacagcatattttctctccctgcctccctctcctgctgtatcttcctatggacttagttttctctacaattgtcctagtaaagtgtagggagaaattccatagagcatggttaattcgggagcagcctgattggcacttcaacaccctgtacctagggagctttagagtgaagggaattacacatagccagggctgatttcgctgaggtcctaccagagagctattgataatttgatggagttttgttcaaccaactgagccttactggctgattacattcagtttacttatcagcttctatttatgcagctgtatgttctcttgagtggaagttgtaacatttgtcgtaaagagagtggctggctcaatgcaagcctccccaagtggagcattattgacagcagcatccagaggcgcagctatggaaacctagagcactctttattctctccgatgtaatttattcccaatttattttcttcatttgggtttaaattagaagatggtgtcatataaatggagactttaaattcatttagaaataggttttataaaatggtatttttaagaacctcttaggagaccaaaagggaatgcttgcctttatgcagttggcaaatgttcctttcccttccttctgaaaaataaaaaataaaaaaaaccccagcacagagctttaagctttccaactgcaaccataattacagaaaatgacattaatttatcccttgcaggtgagtctaaatacataatattgtatctattcacatttttgttagtaccaaattaaaaggagaagctttatcctgtgccaggcattgaaaatatgactgaacaaattaatttgtacatgtctctgaaattctagactctatgaagtcattttctggaagatcaagtaaaatatctaatttagggcctagataacacacatactctctctttctgtctctctgtctctctgttccccccccccccccttttgtatgagccacgcaaacctgcagctcagtattacatcatttcagccattcaaatgctggaattccaagcatgcaccatcacaaccagctagtattacctttaaaatcttaaaacatacttctaaccatctttgtacttaatgttgatttctttgaaactttgtggtgcttcagacaaaggctagaaaacatatttttcctccattgtatatggaacactcatcagaatataccatattctgagacataccttttttttttttttttttttttttttttaccaatttgaacaaatatatacctttgagaatgtatcctagaccataatggaatcaaattagaactcaattactaaaagatgcatggaaaattccccaacaatttggaagttgaggaacacatttctaaataatatatgagtcaaaaaatcttaagtaaaaatattctgaactgaatcaaaatttagctctttcaaatttgtggaagagagtaaaggcaagacttagaggaaaatatgtaatgttaaatgtacatctgatgaaagaaaatgacttaaaaaaacaacaacccagtaacctagtttccatcttaagaagctagaaaaagaagagaacgttaaaccaaagcaagcagaggacaagatcctgaaccatacgggagaaatcattgaaaaactggacaacattgtagaaaaacccatcaaaactcaaagctaactcttacaatgaaagtatcattacagttaacctgcagctctgataaccaagagaaaagagggaagacacaaattgccagtgcagaaaatgaaaggtctatacccacttatcctgtggctactaaagcctagacaacgatcaccccgtggtcaccattgatgacttatgagaaataatagaccattctcatgaaacagaattttttttgttttgttttgtttttgagacagggtttctctgtacagctctggctgtcctggaattcactctgtataccaggctggcctcaaactcagaaatccacctcctctgcctcccaagtgaggggattaaaggtgtgcgccaccgctgcccggcttgaaacagaaaatcttaatgcctcatcactattaaatactcgagcagtaaagagtaattgacccaaaccaagggaatagaaagtacaaatagtttcatcaggagaccctaataaactccttttccttcttcaggattttacacacgtatatatgatagccaccattcccctctttcacactccccacccctccccccaaatgccttcctcgataaatgggtcattctaatcagcctcccaaagcatcaaggttcaaggcacatgtgggaagaagaggaagaaagaacacaagagctgagggatgggaagagggctttgatctgctgctgtgtggacatggctgttgtacacatgcatccataacgttgctggggctgcctgcatgtcctctaggtctcttccagaatgcagaaggtactgctctgataccaaacccaagaaagacagtacagaaaaggaaatgatagatgagtgtcccactctcaacatgatagtccacaaaactgaatccataaagtattggaggaattatgcatgacaattaaaggggctctatcttcaaaaagcaatcctccaaatctgtcctatcagtgaggtggctaaaaaacaaacaaacaaacaaacaaacaaaacaaacaagcaagcaaacaaacaaacaaacaaaaagaaacccacatggtcccttcagttggcatagaaaaagcatttgaaaaattgaaaactcacttataaaaagcctttgaaaaaaattcaacattcattcatgatttaaaatccccggaaaagcatgactgggcgatgatcttccatgttctcataaggaacagctgtgaatgtctgtgcaacctgtgactaacagtgaaccctatctttggtgaggtgcttaaaacattaaagataaaatagtcgatatgtgattgataacctgaaacatttttcaagtgaattttgaagtcttcacatagttagctttgagtgaagagtttttatatcctatttttacccccaagtatgcatatatttatattagaggcatgtttccctcgacttaccctatgtaatttatgacacagttgaagctgcccaaggaaatgcaaagcttctgcatcattttgacctgctgaaccttaatggtaattagtaactttgtatttatggaacctggaagttggcagcattttgccatgaattggggggggggcatatgcaggtacttaaagagctgacttatctctgaaataaatgcttctccattctcctatcatcatgttcatcactctgcatccccatgtaaagtaccagagtgcttgtaagacagtctcttttgagttcaactatctatttttataaattatttttgagtaaccccagatagattgattgttgaacaatgatttcaataagtatgcaaacaaaaatcctgggaacattattggtataaaatatctttttctagtgccagaaattctagaagttgaggtaatttcaaaataatttttgttctgaggctcctgtatgccttttctatagctaacagattactgaaaaagcattgcgtaatgcagctatgaacgctgcatatgaacaactctctattattcatgtgaactgtacatttaacatgaaaaattcaaaagacatgaaatatttataccattaagtcatcatcctaccatatctttgaagctagtgatataggaataggagaacatttttggaagctttgtaaaatggtgtatgtttttatttttaaagataaagaagaaattaaacctttcggataaatagggcctgcaatttcattataatgactacaatatcaaaatgatttaggttaagaacattgaataaaaaatagcgatgttgcctttgatccagcctttggcctcacagtaacttaacacaaactttttcatgacctctataggactatcctcatctgttaactttacttttatctgttttattttgccaaccacaagttgaactgagaatatttctggggatataggagtgtccccttttcttatattccagtggggaagacaaacaaaatagtagaagctttcctccaagtgctcctgtgttcttggtgatcagctgagcataagcactgtaaaggacacaagagaggtgttgagagagtgaagcagggattagacaggagagacacagggcagcatcgaggtcctctgaggctcctggtctagaatttcacttgtgtccgtgtccctcattttgttctctacttttgtctagtcagaggaatgcagatgagaagtatgtaaaaagttgggtttctctgaagctcagttttgattaggtacaaggggaagaatcttcaaaaggagtattgattagaaaaggacctctctcctttgaagatctgcctaatttattggtttgcattcatatcgatctcctatttatattgccaatcaccccttaaccccacccaagaaactcagacaaatggttgaaagacttgaaggaacagactctgaactttgtttctgaatcagattagacaatgactatggtggttatggctgcagtaattgagggagctctgcttatagctaagcctatatccatcacagtttcatcctgaattattttgattttgtccgtctgatatcaacagtgaatcatgatgaattatgacaataaggaacggcagcaaacctaccaggctctatgttcgccattgctcattgcactaattgtgaagtttatgttaatagatccattttactgcggaagagcctaatactcaggctgatatcaaccctcatgtttttcatattgcccatgctgtccccacttctgcaggagggaattcactggcaggcatagtcaccttaattccctgttcctaagcataggcctcaggagggtggtgtatttatttctttctggcagagttgtgctcttaaaaccaaccaaatgtcctgatgctaattccacagggtgaagtggccttgttacgttttgtacctcgtattttgatgttggaagatttgttcagacaatccatcaaccgtatctgatactttatctatcccaaaatgcaaattaaagcccaggaggtccacgctgttgattatcttatgtgtcctaaagatcattatccaaatctctgcccactgatactgtacagaattttcaaaccgagttccaaactgctaagataattaccgtgtgaaacaccctctgccaagcagtcatgacacctttttgccaataatgaggtaaaaaaaaaattctcccagaataaaaataacatcaaaaaagtaacctgcttgcaaaaccaatgcttttctttagagaggagacggcagaagaaataggagtaattatgccaggccgtctcgttggctgagagcaaaattgtttacctaagctttttccttatagattggaatcttgtgttgcagcccaatagattgatttaactgcctctgtgacttcctttcatttttaagattaggcagtccatgacaaagaggttaattgcaacccaatagagctaaactaatgttttattaagaaggagttggcagcccgagcttttaggagaacaaatgttctcataatgtcatgaacaacttacagtgcaagcatcccactcctcatagccaactgtctgttcagattaccccatatcgaccacgtctaagtaacatcagcgaattgctgagctgtcaggcgcacagttaggtttctgtagagaggtgggtggatgcagtcctggggagaagtgagaaatgctgatgagtctttttgctttgacctagacagtgtgattgtgtgacttttcccaaagtttgaccgtaacgttggggttggggagatatcaaatagactcacgtagtcactgatggaggaggcagatccagagcacaaagggatagacggaagaaaactcaacatggcgtggtttacagtagcggggaaatctacagacttcttgagcatgtgtccgtgtagcatatgcactgtcaaggagacacaagtgcctaattcttagcgatgatggggagcaggccagaggtgcccttgtgggttggtgggaagccacggagggagggaaacttcaggttgttgtgtttggtgtggcttttgtttcaggtgaagtgtgtggataggtggtgggaggaaggaggtatagaagtcttcagagaaatgccgatgttagagcattagagcagaggattgtgagagggccctggtcagggctcaaggtgggcagtgcttcctgctcttcctctgatgtacatatgaaaggaacatcacacctcggcttggctttggtgctccaccttctggggcttgctgacagcaaactcctacaggatggctccgtgacaattgcccttgactttggtttctctatgccagaactggcccctcatctagccctgccttttttctcagctagtggtcctcaggttctttctgaagagtaggaacactctttaccttctctgctccagagtttgttagatagatattgacacccactgaaagctgagcctagctcctttgttgcattttcattgtatctaaggcaagtgatgtgctaatctctgtttaacttttttcactcagtgtttcacttattcaaccgaaatgtaattagtgccctttacaagttacgttgatcagactatatatagttgtgcagacacatagaaaccagtatttaaattaggaactactgtttccttactatgaaatgcagcagcaagagtaagtgacaatagctttcatggttgaatttttccttcctcacatgccttattgttggcatggttgtaggagaagagtgaattctagcattctgaaggtttgccctcttgctcagtttattgcaaacattcctcttgtatatctcctttgtttccagatttttttttctaggcagaactttattgtgtatacagaatgcaaatgggtttctcttttgaccctactcagatctacagagatctcacatcatcttttttagaaatataagccttgaggggaaaaaaaagatgagctgggaagtttctagaaatagcctatgcaactataatacccagttgatgtaaggtgaggaattatcagatatagtttagcatgctgatgactgaaatagttacagtcatctaagggcatccttattatttacacacaacaccaccccccccatgaccaaggcccactataggaacacataaatgggctttagtctccaataaaattggattagtcagttgccttttgttaacctacctacagctttagtgccaccatgaagagatgaactttagtttacccaaagtaatctacaacagcattgatgttgccactgtcacatgatgtgtatgctatggtgtatgaaggagggcattgcaagtggctgtaggaagcttccagaatgaagtaatccttcaattgagtctgaactgccattagccaaatagaattctagacaggtaggatgagggtaataaagcaaagagtggggtattatagtatgtaaaaggaactctgggaggcttaactatcgtttgaatttgttttttttttaaattaattttctgttggtttagtaaggttggaaacagtaagaggagatgtcaggcgatagatatagtgtaaatccttgtggtcgaaagctaaatgtcctctcttccaaggacataccatgctatcctggaagtctccaaggttgatctgaaagactgaaataggggaatgtgtgctctgatctgtgttttagaaagaattttagcagcatgtggacttgttctcagggggttgtcacctgactgcaatggcagatgctgtatggtctgacatgtaaggttggaaggcattcattttggaaggtatatattcataaattataaactagaaagcttagaagtgtgtgtgtgtgtgtgtgtgtttgtatgggtggcgttgggtttagaaagttagaaatagcaccagataattcatcaagatcagggacatatggtagatttaggatcggcaacacagaaagaaggtaatgatgagatgacttttggacatgttgggaaccagatgtctacagaatatcttagaaaagcatggccaatggcagagatatgtgtgggtctagcacacagaagagaaattgaggtttgttatagagaatttaagtcaattctttaggttgatgctataatttctggagagctgatggtgtctttgttgccttattgtgagactggaacgttgtacagaactttgggtttcacgcaatgctgccttcaacttgactttaaattctagtcactaggataaggtctgctactaaggaagaaaacagggctttccatcaacacatgccagcttacttctgactgtctgtgaacgcacagaaggagcagaattggtagaagcagttctaagcctgaacaactagtctaatgactcatagtaaagtccagtgttacctgtacgctgcgatttgacaggcattagccttctgcaggcccagagtttcttcagtttagtgaatcatctgaaatttcatcaagttcaccccttttgaccagctgtagttttcacttttaaggaattgtttgggaactatcccatcaatgagtaatactgcagaaatgctgaaatgggtttaaacaaatctttaatagagacgagcttttgatttagctagagaaaagatagttgagatagggccagaatatggctggtttttctctgtttgctcacatctcattggtatttctttgaaattaatgattttaataatggcaatttgagtccccagaagaaattttcttcccattaaattcacattcctttttcccaaaagcaacttctctttctgaaaatatgattagggctttagatattccaagcataacttttttagatatcactgcagttgttaatgagagaaataacatttgttatgctacaaggaaagtagaatgtgtgatatgaaccataatatgggagagtggttggaattgagctatttctcctgtacatcactgtgtacagaagaactgttttcattaaggtggtggtagccactctaacaaacaataataatgtagtaatgttatgtgttattttttctaataaggaaaaaaatgatttgacacaggagaaggatatttcttgtttatgtaataattcaaagcaagtggccctggctggcatccttttgcacagccatccagtggctttgccttccccttaggccttaccagttgcatccagctggtagaagggggaggactccttgataccaacttgcttttgaaatagagatacagatgtggcatcatgtttttgcttacagtccattagtgagatatagggacttggaacacacagatgcatggggtgctgagaaaggagttgctggccaggcagctggtttcccttaacaaactcatgcaaagcaaaggaacacaaaggtttttaaacctagtatctaccttgactactgggactgcataatagatctgagaaaggcacagatgttacaaaataccacagatattagaatgtacctcattttagccacacttcaaacatattatgggtgtttacttaaggataaaactgacacttctcagtttttctggatagagtggctacaatcctttgacattctgagagaattcatttccaactcattgtatatgaataactaaaactctcttttcatcttttgaaggttggacgaagtttgcccgattgacacgggctttgacaaatagccgaagtgttttacagcagcttacaccaatgaataaaacagagacagtccacaagcattcaagactagctgaagtaagtatgagaaagactttgttttcaaggtagtggcattgatacacttttccccaaattactcaatataagcaaaattgttagtgattatctatctatctatttatctatctatctatctctctatctatctatctatctatctatctatctacctacctacctacctacctacctacctacctacctacctaactatttatctatctacctatctgttgcgggaaatattaaaaaagaataatttcataaccaattgataatgataaaagctgcctacctagattagacaaattatcccaattattctatcctttatgatatcataactacctgtggttatttaaaaccacaagggatcagtatcttcttactgtctgtttaccttcatcttggcttctccctctctcttctctgagtcactctctgtccctgcaactctttgctctgcctcccctttccctgtccaatcacaggcttcctgctgcattaatattataatgtaattggagcttggaaaatcttgccacacctatctatttgtaaaactgtagaaatttgaaatatttctttttgttctcactaacttttgcatggagatgtagttcatgctatattatgtgatgcttagagagtgtatgatttaattgaacaaatgggacagagcatccatccatccatccatccatccatccatccatccatccatccatccttcattcatttgtgtgtgtgtgtgtgtgtgagtgtgtgtgtgagtaagacattaattgannnnnnnnnnnnnnnnnnnnnnnnnnnnnnnnnnnnnnnnnnnnnnnnnnnnnnnnnnnnnnnnnnnnnnnnnnnnnnnnnnnnnnnnnnnnnnnnnnnnnnnnnnnnnnnnnnnnnnnnnnnnnnnnnnnnnnnnnnnnnnnnnnnnnnnnnnnnnnnnnnnnnnnnnnnnnnnnnnnnnnnnnnnnnnnnnnnnnnnnnnnnnnnnnnnnnnnnnnnnnnnnnnnnnnnnnnnnnnnnnnnnnnnnnnnnnnnnnnnnnnnnnnnnnnnnnnnnnnnnnnnnnnnnnnnnnnnnnnnnnnnnnnnnnnnnnnnnnnnnnnnnnnnnnnnnnnnnnnnnnnnnnnnnnnnnnnnnnnnnnnnnnnnnnnnnnnnnnnnnnnnnnnnnnnnnnnnnnnnnnnnnnnnnnnnnnnnnnnnnnnnnnnnnnnnnnnnnnnnnnnnnnnnnnnnnnnnnnnnnnnnnnnnnnnnnnnnnnnnnnnnnnnnnnnnnnnnnnnnnnnnnnnnnnnnnnnnnnnnnnnnnnnnnnnnnnnnnnnnnnnnnnnnnnnnnnnnnnnnnnnnnnnnnnnnnnnnnnnnnnnnnnnnnnnnnnnnnnnnnnnnnnnnnnnnnnnnnnnnnnnnnnnnnnnnnnnnnnnnnnnnnnnnnnnnnnnnnnnnnnnnnnnnnnnnnnnnnnnnnnnnnnnnnnnnnnnnnnnnnnnnnnnnnnnnnnnnnnnnnnnnnnnnnnnnnnnnnnnnnnnnnnnnnnnnnnnnnnnnnnccccctcccttctcccctcctcctttcccttctcttctctttctctctcttccttcctcttccttcctttcttattttctttcttttttattttctttctttcttattttctttctttcttattttctttcttttttattttctttctttctttctttctttctttctttctttctttctttctttctttctttctctctttctctctttctttctttcctcagtagctgttatcatgcagaaggaagagcactttgtggtatagccatgcttaaataggatatgaatacaatattaagtaattctgttcatacagaacaaagacgaccggcagctggctcacattcgaatccagccaggtggagtttccttttcaagagagctccttactaagtacaacagtgctctgtaccaagtacaacagtgatccttactaagtattccttagcaagcactgcttccttgctaagggtctgagcttgcttctgcgtgtgctgaggtattctaagcagataccctgctggcccctttctctaccttatccccctactagaatgaagggtctgtaggagggaacagcctgaaccacaaccactccaggatgttttcctgtgagcttttgcatttcatcccatcattgcatggccatttcagggagtttttccactctcattcttttcatttggctttcccttttcttttgtttttgacttttgatttttttttttaaatcagtcagtgaattgggattcataaaaccaaatccaatgcaaaactgctttctattaggtctgaggtttgctgctttacagaaggcagaagttgccagactgtcaaatgagatttcctccatggtcatgcagaggggctagggggaatgtgcccttggatttccaaaactagatccaaaagaaacaccaagtgggcgcaggagtgttgtcttttcagttatatgaaagtactaaaacaatttgctcgaggcagtttcctctggaattttcacttttccaagacacataaattggatctccttttcacctgatcaagaattggagtggattctaggatgaaagattctgtccccataaaagcagttaataaattgcccacatgcaccggtatctgactgattaccttcaacttatgttgggtagggataaatactgtcacctctctgtcagggggccagactgccttagcccaggtagcacttagatcttcaggtggaaacagtgtgtattgatgcaaaatcaaattcagaaatgttactgtattctcataccgatctaagagaaaggaagatggtagacagagctgtcactcactgccttatagaggagtacaatgcagagatcaggtagaagacctggcttcctatgtccaaggtcaaaatcccaacaggtgtgcatcgtttcctgtgtcctacccttcccccactcctccactggcctctctcccatgcccttctcctccactggcctctctcccatgcccctctcctccactggcctctctcccatgccctactcttccactggcctttctccctctatttatttactcctcctcctcctccttctcttcctcctcctcctcctcctcttgctcccctccctctggagcatctctcctttgctaatcctgtctgactagctaggattgaaatggaaaaaggagaaaaagataccatgtgagcgctacactggtcacctggaaaagataaaatataggctttctcaaaacccacttaaggccagtgccatgattttcagaggtgaggtgtctaggtgcgaatacaccacacttcacgaaaccttttcagaagattctagtgtgagccagatttaaaacacagtggattaccggtagagatataactagagaaggtgaagatacagatgacggcaaaggaagcattttccatctcttcccccctaccacccccagtggaactgtagctgatgctggctggaaggtaagagagaagccataattacgcaaggttctttacctcaagcactccatctcaacatggtgctcactttcctgctaggataaatggttagtaagtaatttaagaccttagggataaaatatacccagggctccgagaatgtaggtagatacataaaatagccttaaaatagtgctaacagccccaagttaaaaatcataagtatgatatacaactatagaaaatactagtagcatttttaatgttgaaaatagccagatacctagtttttaaagtaagtttgatgtatgagaaactttagaatactcttccagactttaaaaggtacatgaatatgcaagcacacacacacacacacacacacacacacccctatgtgtgtgttatggaataaacaataaagctatacagttatatgctaatgcttaccttcgattattcatgcattcaaatgtttgatgcatttatcactttgactcctccctcctggcttgtttgtttgtttggtttttttttttagaagcactgaatagtgattgtataagttagttaagaaaccccattgcgccgggcgtggtggtgcacgcctttaatcccagcactcggaaggcagaggcaggcagatttctgagttcgaggccagcctggtctacagagtgagttccaggacagtcaggactatacagagaaaccctatctcaaaaaaaaaaaaaaagagagaaaaaaggaaagaaagaaagaaagaaagaaagaaagaaagaaagaaagaaagaaagaaagagaaaaagaaaccccattgctacagtctttggcacacacattacccttaatggcattaatgtaagagatggaaattttggatatgcttcctcaacttgtttcacagttcccagagtccagcaggcaatctaaaccctgtcttgaggtctccacttttggcccttgctggggtcatctgcttttctccttctcttgctttaattagaccccacagagtaagttaaggtttatataaacttgctctgatagttttccatttgttaaagaggtacagagagctaaaccttatactatataatatttagtactttattttgttttccaaaggaagcttgcactggataagaaacacaatgctcattttatatcctggttttagagagaaaaagggaaaatgggctgtatcactccccagttctgtcctgttagccaccaggacagtgagcttgctgagcaaatccagcgagactgccaacatcgaggccattggttcagggagaccattagaagcaaaaggatgttttctaaggtgtttaatatgtgtgaacaatgaatgacagtcagtcacccgagtaactatggagcagtcagtgaaagtcacatggttcttgtcaggcttgcccagtacataagcaggagcatctgaggtgctgtgccactggagagccaggcggatggaccagtaatcagatcaactgttgagtagttgcactcacacatgggtccttcgagcaaactttggggcagttcggaaaagggaatggaaacaatacagaatgattgtcctaaaactgacaatcatgtgactcggtctgtgattggggcatccagcaggtgtgcagtcacagctgtcttcagaggcgtcccaactgtttataaacactgttgctttcttttaggtgcttcagctgggatcagacatccttcctcagtacaaacaagaagcgccaaagacgccaccacatatcatcttacactattgtgcttttaaaactacttgggattgggtgattttaattcttaccttctacaccgccatcatggttccttacaatgtttctttcaaaacaaagcagaacaatatcgcctggctggtgctggacagtgtggtggacgtgatttttctggtggacattgttttaaattttcacacgacttttgtggggccgggtggagaggtcatttctgacccgaagcttataaggatgaactatctgaaaacttggtttgtgattgatctgctgtcttgtttaccttatgacatcatcaatgcctttgaaaatgtggatgaggtaagtttttttggttttgtttttggggtattggagatcagatgttttgaaaacagtcgagttaaaaggatcgcaaggatgacaaaatgtctttttcagtttcccttttgcaaacccacaatattattaagcatgtgccataatcgttttgttttgtttttttttttaaattaatttgtgcctgtgttttcctccaagactttaggctgaactgatgaattgctagataaatggctatggttgaaagttgtgattggaggaagacaggaggaagaggcaggtagaggaggagcaggaggaagggagggtagtgcagggggaggaggaggaagagggaaagaaagaaaagcaggtgaaagagcagggggaggagggggagaaggttcattggagaggttacaacaatggtgctcttagagtcaaatgtagttcacaaaccaggtgatgggtttagggcacagaaatacattttctctgaaagacagcagctttgaagacttcatgcctttacaaacctagtgactttttaaacttaagtcacacatggtagctgtcttaagagttaacctaaaaaccaacatatcttccaacagtttttgagttgttgcaattttgattcatgcttttgctttcaattcattataaatacagatataggtagaaagtgtatttgatgacttgtgatgtctggcctcactcagcgttctggtcttatggtgtttgtgaaaagaggaatatttagaatgtgtcataccttaaaggatcccttcgttcacagctccttctctcaaagttaagggtggatgactcaaaaattactgctccaagcggggaggatgcaatcaataataaaacataggccaggcagtataaaggatagctttttaaaatgttttaacaatgataacgctgccatgttgctttccctaaaaaccctacagtgtccctgttagatcactcaattggaaagttcattgcactgttgtggctctgtgtgtactgggagtagactcaacattttcttcatcgactttcccgtaaattttcttttaatacaacaatcagtcacgtggggatttgaatgaagttgacctcacataagtagagaagtatggtagggcagagccctggggtattggaggaggtttgggaagatgttgaactaagactacaaaattctattcattcagaagaggtcagctcaaaagatctattgtgccatgtgataacacaattagaaatatactctattcttaaaaagtcctgaatgagtggattgataagagagagagagagagagagagagagagagagagagagagggagagggagagggagagggagagggagagggagagagagattatttaaacgtgtatcactacaacaaaatacctagacagattacttatgaaggcaatattctgctcatagtttttgaggatcaagaacaagatttaacagccccatttctttgggtgtctgattaaaaaaaccaaaacatagatgtgagcatgtggtggcacatgctgccacaccttatactagaaatatacagagagggtataggcagggccccacaagccattgtaagaccacattcccaggtgacttcagggcttccccaaggccctatctcctaaatgcctgcagcttaaccctagggaagaagcctgtaaagatgggtctctgggggatggtccacatgcaaaccatagcagggactaaatcttctcaccgagttcccacttatttcaagctcagaactcagaggtctcaccttggtcccttgaagctggccacagtgtgaacatggtggcaagcaacacatgaggagatcaagccccttcagctttaactctgtacagctagttgctaacatcagacaacacactgctgaacacagttgtctgaaggtggctatgttgtgggtctgatgtactgtcacattgaagacacatttcccaaaggtgctctcagcctaagtatggagggagggaggtctgtcattaaaagggacttatttttgatgttgattgtttacttttgagatcgtgttttaattcttctttctctttcttctctccaaacccttccatatatctatctcactttccatcagattcatggcttttcctttccacccacggttattgcatattgcgggcatatgtatgtatttggatgactttcattctggccttctctctttctgcgctgcattttgagctctcctttaccaaattttccattaactttttgattgatgccatatctctgtagtgtctagaggctccacccccaacttcctgtccttcatcctctatatcctccagacatttattgtagtcaaattcttgcacaaggactctggcttggcacctgttccttccaggacctggacagaccaagcaatgtgcagggatgcagtgccatacactggtcaagagagtgaaaataagtcaaggctctgtgaagaacagtaggcggtaacttattttaaatagaataagctttagaggaaaacatttaaattgtttaggtgatttatttattaataatttatttccatgctatcaaggaacacatctgtccacctttcctctggcaattcaactttaggcttcatctttgctttctcatcttggaagctgagctttcagactcctttcctgcttgctacattgccattaacttattctcataaaggtagcacatccctttggttcaataaacattgccaacatgtgtatagccaacagacttgccgtcactgaggtgtccagcatcctgtagtagccttttcttctctgccctttctttctcccaaaggttgctcatttctgtgtagttactatcaggtatttaaccttcaagtttccactccttgattaaatgtcttttcactataccaatgcaagagatatttattcaacttcagggacttaaacaaatgtctcttcactatccttccattcgagagattggttagctgtctcatactttgtcttgaaataattttccttcagaattttcaaaatatgatatttactgtgttctacctttcaatggctccttttaagaaacttgaaactattagtttctgatcctttacacgtgacctgttttctctttgtagaggcttaatgtatctcctgcaaggatagatactggtttagatactgtccagtttagatactgtctgatgacgcgccttagaatagggcctctttcatacgtcttcatagatatcgatggaatgcccttctttgatctcaaaaatcatgaattctgccgtgataatttctttttatgataaatctccctcctttctgtctttctctgttttctcccctctggagcactttttgtttaatgtgttgaacaaaccctgtaatttccttgtttattctaagcagctttccaagccatcatctctatgctgtggtttctggggatggctttatcagtattttctaactctctttgaccataatgatgcctttttgcctgacactaatgcagctaaatttgcttttgcatcacttgtgtgcacttggcgtgtgcattgctatatttaatgttctgtaattgtagactattacattcaatgtatattttataaagactagatagatgctgagagttgtcacactatgcagcttaatttcttcatatttactgtgattaaatgcattctgacttatttagagcatcatattttccatttttcatgctttccctgtctttcttttttgtgctgcctccttgataatttatcctcttctgtatagactgaggtctgaagtttccctcaatacattggaccctttctaatgggctgaatatatatccctgctaacccatgattcttgtatttttatatcagcaactgacttaaatccctaaagcttgtgagactctttacctttctctcaaataacacaaggacttctgttcattttctttataatttcaaacatctattcattttgttattttatgtgcatgagtgttttgcctgcatgtacacatgtatactagtatattgtgtggacctggtacttgtggtcaaaagaggacatcagatgtcatggaactggtattgcagatggttgtgagccaccatgtggagcctgggaattgaacccaggtcctctgcaaaagcatatatgctcttaagtgttgaaccatctttctagcccttcttcactttctttaaatttaatatattatactttggttccacattgttcttagctctctcctttaattatgttattctcccacttcattgtcaatacaatctatgtgtccacttgtttctttgcttgcatggtatttaatgcattcttggcgttcttctgcttcagttcttgaagagttggctctttgttaaccacttattacataacatcccaggaaggttttttttgcatccatctcaacacttctaattaataccttcatatttcatctccacttgtgtgcatccatgtgcattaatgtggttaaagttattccaattttattattagtcttcgaatggcctggactcttctgcctagcacagggcatgctttgttgcgacagggtggcttttcctcagtcttgccttgagtttcttacaagatggttgcaaagactaagtgtgaaagatactaatgcgtttcacttgaaaacttctaccagcccgagaggctgttgttactttatttgttgggtttcctgtgtatagtttcattgtaaatcctgaggtggtgaacaatatgtccctatggtacttctttgttggatggatgcacagggattacatgaagttttactaactcttagtgatttctacaatgatgtaaagatggaagaggaatcacaccagcaagtatagcctagggaataagagactataagtctgggaatcacactttaatccttcattcctgtacatgtacagaataactgaaagcagcttaatattactctattttcaagatctttgatattctatctgaagataattcgatttactaggaatttgtaaactggatacatgctttttagagaaaactacaaggcaagaaagacagaacctattacagaaagcttttggtctgagaataggaaaaatgtatgtcctagaaatcataaaatggaggataaaaaattctctcatgtgtcctaagagtagaatatagctcatttgcaatgtgcatttgaaccagcatggaggtctagcgtggggacatctcaggggagcaggtgggtaaagtacataagaaagattgggccggcaggcaatgcgctggtcagttgcaagggggctggaggggtaagatgatgctggtgagatgatgctggtgagatgatggtgggtatctggctgcatggtaagcctgaaagatgagtccgagcaaagcagaactaggcaaatgattatcacgcacggatgctgcaggcaaaatagatgaatcagcaatggctaagtggaagtagataagagttctaatttttggaaacgtctcttaaaacagtgtctgaattattatttgttcataattatgcttgtcaaagtgccacccacatgttacctcacacatttaaaattgtgatttttatctctcattatcagaataagaactgagactccagaagagggtaatcgagcttgtagatgttaatgagttttgtcagactagaacctctctgtcccttttgccatttcagatccaagaatagtaatagtagacaccattatttaaacaattgacttgctatcatgttttaaatgaaaatagatcatcgaaggcaaaaaatgggaggattaggaaggtgtgcaatgcagtttcttttgtgttatttcttctaccattcacccctagtaatcatcgtacatggctctgggctgtatgaggttactctttgtacaggtgtggtgtgctttgtgtgctgagcaatcctccctgtgcctcttctccttcctcatgatttctccctattttcttagacagtttgtttctacttttgaatcctctgaacataaacgattttatgtatgtgtatgaaataaaggaagcataaataagaggaaacacgcgctattgtctataagatggctcaattaagtttatggctatttccaatgattctagtttcccctaaaggatataactttgttctttatagctgaatcacatttcacgtgtgcacacaccacattttctgtatccagtcctctgtgcttgagtgtctgtgctgattttgtaacttggtactgtgactagtgataacggaatgaacatttatgtacgagtttctctgtgacatattgagttgggctcttttgggtatagcttggtcatatgggaggtctatttttattttcttgaggaaacttcatgctgatttccatagtggactagctacttcctattccaccagcagagtgaaagctttccttttgtccacactctcatagcatttgttgttacttatatttttgatgactggccttctaagtggaatgacacgaatctcagtgttgttttaattatttctctgatggctaatgagactgaatattttttcaaatgtttattggttatttgttctctatcttttgagacctgtctatttccttagcagatttattgatttctttttgtttagctctatctatctatctatctatctatctatctatctatctatctatctgtgtgtgtatgtgtatatgtgtgtgtgtgtgtccccaatgctagtccctagtaatatgcatagctagccaaaatttgctccatccagtacctgacttcttcagtttattaattttttttatttactgagtagaagtttcatattttgaggttccatttgttagttgttggccttatttatggagtacctggagctttattaagaaagtccttgtctatgtgtgagtcttgcagtgctttgtgtaatgtttctttaaaagttttcatgttttaactcaattgttaatgcctttgcagtatctggagttgagttttgaatagggtgaaagatagggatctagttcattcttctataaatggagatacagcttttgttaacactggctgttaaagaggctctgctttccaatgtatttttttgtatctttgtcaaaaattatatgtaatgcaaaagagctaaggatcaaggcagtctatcgtgagattgtgtttcctagtaacatcagaaagaagctacctacacacataatatttcaccaacatgaccacccaaatatgaacaaaacaagatcagcaatgaacatggcacactgcatgggaaaagcccacaaggcctcaatataccaaaagaacaaccggcaacagaagaaatctggaaacaggaaaggtagacttccccagggaagagcattggttattcagtgtcaaattcatccctaaaaacatacatacaaggaacattataaggacagagtagactgtatttagaaacacacagacacacacacacagacacagacacacacgcacacacacacacacacacacacacacacacacacacacacacagacacacacacacacacacacaattttaaaaggccatgaatttgaaggggaggagtgaggaatatatgggagggttttgtgggaggaaaggaaagggagaaaagttgcaattaaattataattctagaattaaaaaaatcatagggcggtagctatggcggtttatatatggatcctttactacctacacttccaattttatgtaaggaccactctggtttttactatggttctctagtttcatttgaaatcagaatagtggtacctctagcattattctttgtccttaggattgctttttttttattggcatcttttgtgcctacatatgaattttaagattattcttctgtttctttaagaaatggtattggaatttaatagggattttatagactggcaaatttgtttaacttaagttagtggccttgctcactttattccaaacagattggtaaattataagtaacaggaatttcctttttggttccagtggctggaagcagggggcaaaggagctgtcatgggggtggtgagggtcttatgtctcacatgcagaagatgggagacactgacttaaatatgtgacattaattattcctgagatggagcactcagggactaaatgtttccccttaagtatccttcctcaacaatgatgcattgagggacatgcttcagcctgtgtcttgtagtagacaaagctatctaaagctctgagaggtgctcagccctttttgcagtttcccaatggacaacaccatatctatattcagccttaagacattgctgattgtaatcagcacccacttggataggtctctcatgtttcctggcttttacctggttatgctttgagtgacctttggatttctagcaagacagacttcataagccatgtcctcttaaccatggactaaaagcatgaactaaaacaatctttctctctgagatagtcagtgtattgtattgtgttagcaaccggtaatagatcgagacatctatgttaccctgctacccaagctttatgctttctgttttttttttattgactatgaccaagcgatttctttttggccttacagatgaatattcgttgttcttactctattaccatttgttgaaaacactgttacaatgttctatttggttccctttgttaaaaattagctgagtaattattgcacgtgggttatttgttatgtatttctaggttacgtgttctgctgtattcatctgtttgtctagtcttttgccaatcctataatctcttgattgctgtagctttacagtaagccttataatgtgctagcatcaatccaccctttgactttgttgtttttcttcaatagtatcctggatattctgttttacttctccaaatagatttcagaattattttgtttatttccactaaaaatttgctgtaatgtaattgaaatgttgttttattaatagctcaaataaggaagaattagtatgaatgttatatcgagtgttattattcataaacatgcgatatatcttcatttttctatccttttgtgtgtgtgtctggcatatgtgtttatgcatgttcacaaatgtgcaggcataaatgtacatgcaagcatgcgtgcatatgtgtgtgcttgtgtgtgagcatgctttttccagttagaggttgtcactggtgtcattctctgtttatttccactttatgttttgaagaagaattctgtctcttggtttagctcagaagcttctttgactagtccagctagccctcttgcttctttgactagaccagctagccatcttgttgcaaacagagattcgctgtctctgctttgtgagtgctggagttagggacgtatggtggtcaggagtataattagctccttgatattaactttatttcctttacttcaaaaatgtattgtttttccttttttcttgtcttattgaattagttgagatttctattatgatgtcacacaaaagcatagagaggggaggcacatctatcttgttcctgatcttagagaaaaaattcctagtttttcactgttgggtataatatttgttgtaaggctttctttagatagccatttttaattgaagacatgtaaatattcttagtttgctgattttgtcacaggcattttctgcattcattgatacaatcatgaaaatcccctttctttaatatgttttttggccttcaaattttgaattagctttgcaatcttgacatgattctacttagtcacagtgaatactattttattttacattgttagatccaattttctgatgtattgtttagggttttgcatttatatctacaagagacattagtctacagttttcttataatctctttagttgtgctgtcagtgtaatgctggtctcacgatgtgccaggcgtgttctggagaaatctctctgttctcattttctggatggtgtagagagctggaggagttcctttgttgaatttctgagaagattcagttctgagcccacctaggcacgctgccttctcaatttagatgttcttcctattcattaattgtatttaatagatatattcctatttagatccctattttatagagaaatattattagagatattcccacttcttatgcggattttagcagatgatataattcataaatttttcttatctcattaaaattatcaagtttattgccatagagttatacataatatttttagatatatttgggacttttttgagattttatatttgtaatggtgttacctacattgtgtctccttccccttttctctccttctcttttccccttttcttgctctttcttctcattggcctagaaacttactatattggtcttttgaaaaaccatcgttgggacttattgattatgttgactttcttgtcttcaagtacatggctttcagatacacacacacacacacatatgtgctttactctatctgtgacttaatttgctcttgcagttttggctaaggtggcagtttggaacactggcatcggaatctttctcctgttaaagcacgctcacttttctctgagtaactgccacgctccactcatggcgtcagggcatcttctcattctttgatacctcaaaataggcttaattcccctgaaaattttcctttggcatagataacatttccaaatatgctatttaattttctggtattgagagattagatactgatttctagtccagtttaatcctcttgtcatccacgttgtttcatttctgctgcttttaacaactattaagtgtcccaataatgacttgtattttatatttatattttgatgagtcatggattcatggtttgcccactgtgatcttccatttccgtgaagaattgaaattgtacaaagatctttaaacatcagagggttaggcactttgctagcttctgaatgtatagaaggaagaccttgtgcttgccaaaggcagagacactttctaactgaacatcttggattttcaattcctgcctaactgccattcaatttctacattgttgctgttctgctgaggtttcatagtttatcatgtttgcttggattgcccatttcttgttattaatagaagtgaagggtcaggaggaaatgtctcacagataagaaaggattccttgccttttgggtactgtgctcacatctctgatcagttccatcctatggataggctcatcttcacatgtaggaaatattccagtttgattggccaaatctgccattccttcacatgtgtttagcgattgattcctttggggtataggtgggacttcctactgagcaaacaaagcatcgcaaggcatctatctagtaaaaggtgatcatggtacagtctcaggatggaaaagctctcaaattctagctttagagaaaaatgacttgtaaacttctcttcttagagaaaaaaagattggacagagtgaaacttaaaggggagaaaagagttgaagggtggtgtcatccttgggttccaaattgccatatggtgagtatggtctaagacattagattctattccttgtgtttactggttgggtaatacacagatttaatgattaacattcttcttgtatctgaaattgaacaatgttgcaggcctgtattattttgcatgagttttccactgagacaaagcggtctgtctgctgagggaattagctcggagagaataggaaataacaagtaacgaggcgcctttatttgatttttctgcttacataagaagacacttttgtctgttctgatgttcattcatgatgaatgcttcctgtctttgagctctggggcatgattctaaaataagggcaaaggagagctggaatacattgctctctgcatgctgtgtgtggaaattgcacgttaactgtgtccatgcttgtgtagaagttgttcttgtcttttgtgcagcactcattcccatgcttgaggatatttttcctctatggatctagtgggaagaaatacctgccttcacttaatttcatgatgcttcctctttcccataatattcaggaatctataggaatatgttcattgctctcatcgctgtcttcatccttaagaagttttgtttaagctggctatggtggtgcacaactttaatcctagcacttctgggaggcagagtaggagaaggaggagcaggaacaggaggagcagcagcgggtggaggaagagatgtggggagggcaggcaagcagatctccgagtttgagtaaagcttgctttccacagggagttccagggcagtcagttgcacagggagatcctgcctaaacaaacaaacaaacacataaataaataaataaataaataaataaagctttgtttattagacattgtgaagagtgaataagtcacttccctttcttcatgagactttgactttggtaaaccttcttcctttgtcgctctagggatcaatgaaggaaatttatctgtgttccttggaagtaaaaaagaggttaaacagaagggtcagcctggtgacctcccagagactgagccactaaccaaagaggataagcctatgcaatatggtccaaccacatatgtagcagagggctgccttctctggcctcagtggaagagaacgcacctaatcctatagagatttgatgcaccagggtagtgggggtacagggtgggtcacctctcagaggtaaaggggaggtgggggggggaagaatttcaagggaaagtaggagggggcagcatttggactgtaaatatgtaaattaataataataaagaatggtcagtatttttatttgaactacaagaaactttcaatcaactctacttacccagatgaggttgctaaggtgtaaagggcgttccatgcatgctgcaactctgatatatccatgtgagacaactacatgggattattgcttttaaaggcattgggtttggttagctagccagtcacgaggctctcactagttgcatgctcttaaatcgctaccacatcctgccaataagacaaagcagacatgactttattactgatcagaggtaagggagaaacttgccttatgaagtgtgggctgtgtcactaggtggataaacaaagacagaactgttgagcagtgcaaatgtgcttcagggttggagtttctaagctggggcaggttatagtgctctgctaagttgggtaatgcttaaagagatgatgcaatgcttcagcgttagtggcagcagcaaagcgaagatgattatttatttttggccccagggaatgattttgggctttgtacatgctgagcatgagctctactgctgagatagacacagttccaagatgtgagttttgaatcaaagggatgaaaggatcttaggagaacaagctgtctgctgatgctctctcctgatgaattatgggtctttggtaatgtgcaataacaggaaaacaagaatttggggcaggatgtcttgggaaataggatacagaggtagaggataaagtcatgcgaatggagacagacataaattcagttatgtgtcaaacggaatgcttggggggagggtaggttcagatctcgtggctttaagtcaaggtagctccagggttcctttctcatatatgacttgtctgtggtgggacgatggggcacaaggagagattccacaggtttctatgaggtcaaatcccacagaagaggcttgttttagcaatgagcagtaattgatatttgcacactttctgcgactgatggtaactatggcagtcctgtgagttgacttggtatattggtcagtactgtgggcacaaatacggattttactttgccttctttggtaggaatatctatcttcttctcccctttgctctcttctttctctcatttcatttttctttcctcctctcctccccattctctctctttctcctgcgtcctctcccctctgactaggtattttaggctagttcagagtcactgcgcatcccgacgtggcctgagtttaacagtcttcctctctcaagcttctgggtgctgggaatatagcgatgtgacgtcatgcctgacctaagacaatatgtgtttgtgtttaggtcagtgtgccaactaaacattagctctcttcagatactcttattgctgcacaaggaattatattaagttttgattggccttcctctaacgattttgtttgattttatagctattgaaattgttctagccactcaaaatagtatttttatcaattctttgagaattgcacacaatgtattttaaccatatttgctacttactccttccctaagtcttctgagatcaaccccgtacctcctcctcaccacctctttctaaaattgtattttattttagtaatctaaggaatccaatctgtatttctcttatattcatgactgtggtggcatcaactgtagtgtagtcagcctgctaagagtcacacccttaaagaaccaattttccttcctcccgaaaccgtttcctgtcggtagcttccctttggggtggggcttgtgattcccctccctcttccattgttcccaccgttactgaggaggtatagatatcagggactgggcaacactattttcttataattccaagtttttaggccaactagactatacatctaatgaatctgtttgaattttagaatctattgtatttcatggtcagtactaaaatctaaaaattaaaattaataggaatatgtctaattaatgacaatgttttctatattggcaaaaccgattatttttaggagatacacaatatctatgttagcatagatgataggtttataccactaacattgttcatgtttctgggatgtataactaataataattgtttaaagtgacttcagggatgttatggtacatttagaaataaatgacccaaggaggacttttgtttctctattgaagtcatccttttggtgtaggaacaaaaacacatcttctttatttaatccatcaacatgcttccaattatctaagttcccttttactctaactgatagggatcttgcagtgggtgagcttgcaattcctcctgtcttcattgaaatagttaagagaacttgtttcagacattactaataagaacaaagaattctttattcaggactattggagagaggttgttgcaatggaggtaggagaatgaagtcaatttgctgagacaaatcctcggaaggtaggtcagtaggccacccgtgcttactgatgtttatcagagttgggactaaggtctggataatagagaggggtctgtctttttactatgtcttcagaaatattcctcaaatccccgatcaaatagtttgtggtttataaaacaggtaaggggttaaaaaattacatattaaaggactacagaaagaatatttcactggatgttttcaatggcaaatatgctctaaagaaagggaagtcaggggcttggaattgagatgaagcctgcctaaagagtaacctagttaaggacattttggttagtttatattctggtgagagaaaaccacagtgaacaaaatggaaaatttaaacagtatatatgcatatattatatagataatgacttgagtgcttagaagttaaaccacgtaggaaggtatgttatggttaaatatagctgttaaatgatattatctgactttaagtgataggcagtttaaatataaggatgacattgttttagagcatagaaaagagaataattattaatctggctcactcagtattgtcctcaagtttttcctcttctctctgtttccaggaatgttacgtttgtttgtttttgttttgttgctgttgtttttatagctctagataagatgatcatttggattagtgtatttgataaaggaaatcaccttcccctaggtggaagagtctctttcagtaattaagaacccaaatggaacaaagatggaacaaaagaggaattccttttcctcctcctctccctcctctcccccttcccacctcttcctcctcctcctccatcttcttctcctccttcctcttctttgttctcttctgctttaatcacttgattgggtctttcatccattttgtcttgcttcgatatggggactaataaagcagctttgattcttagtcctcagacttggattcaattatactgttgactctcctggaccttagctttgcagatgctatcacctggggctgtgaaacccttataatcatgtgagctgatttctcaaacctctttcttgacatagatataaataggggtctctctatggctgtccatatgtcttgtgattgatgtgataccttatacacctgtattttttctctctttatactgtctctatttctacctctatctgtaggtctcctattggttctgcttccctggaacactctgggtcatacactgtcctagttttcttctccattgctgaggtaaaaccctgacccagagcaaactgagataaaaggatttatatgttgtatgctttcacgtcacagtcaaggtagggcatgaactcaagtaggatcccaggcaggaagcatggtagaaagccatttactcatttgctggccatggcttgctcagcttgctttcttatgcaacccagggccacgagaccagggattctcccttccacctggtctgagccatctctcatcaatcccaaaaatgcctcacagacttgactacagggcagcccagtgaaaacagttcctcatttgaggttctctctttcctggtaattctagtttgtggcaagtggataaaactaataggcacacacacttaatgttcccctttctcatttgtttacatagctaattgcaattgcttcaacatttttctgtttcaaatttcattgcctgttactttattctgacagcatttcttggactaattatgagtgctataatgcaagtgtcccagcttctttgatgaaaggaatagctaagaaaggtctcaaaagcaatgatacttaagcccagacctgaaagataagtagaagtttgtcaggcaaaagaagcagttggtaggttagagacactgttttaaacagtaagcttgaagatcccctaggagaaagagaatatgaaatttttgaaggaagaaaaaaagtcctttatgaacagagtacagagagcaggaggcagctgcagattgcgactggggagatgggctaaagcaggctgtgctacagagtttagatttgattataaaggctacaaaatgtatccaagaaggagttccaagtgtcctccaactttgcttgattgtaactataatgtgtagagaaagtagagattttagttaacatatctctttgtatgttgcatattttggtcaggccttgtatttgctgttgacccagtcgttacttttttttttttaaaggcctcttctgtaatggaaagcattaaaaaattaatacattattggtgctaaatggaaacattccccccattaacctgttgtctatctttctgtcgatttgtctatttgtctgtctatctatctatctatctatctatctatctatctatctatctatcaatctatctatgcaagtcattgtgattcagtaagaatacaaattggctaaagcaggtgtcatgcacaagccatttaaattcagatcccctactgaaggatgttgctaatgcttggagtaattaggagaatttccctctggagttcttggtagcatgagtcagagaagaaagttctgaatagaaaggaggcaatagaatttgttatctgggttagaggttcacataacaaatgtagtttgcaattttctctcagtcttcaaattgcactctgcaaaaggaaatggaaatggactatgtagtcactcatgtataaaatctatttagaataagagcccagtacttaagaaacagagcttattgtttatgtgatttctatccatttgtctgatatagtctacctggaaaattaaatatctattcattatttattacagtatcaatggtggaggagttagaaactattatgagagacatctacttactattttattcttttattactgtactatttttgacaagcattcgagtgcctactatgtggcaaaataatacaggatgtcttgtggataaaagaatggacaaaatatgatgggtcccgacaaccacaaatacaaatataatgatgaaaatgtatagttacctttgaaatgacttggtctggataagaaaggagaggttacctctgaggagaagaaagccgtcttctgtgctgagctgtaatgtcttaatagacagggacagggaaggatcatagaacatcttctagagcaaatgacaaatacagagtccttgtgtttgagggagctggtatagtccaaggataagaagcaaggtggttaggggacagaagagtgtagattgaagttggagtgataagcatgagctaagttatgtatgtgcaaagcttggaataatgaaaagctatgatgatgagctgccagtcattttgacgatgaaatttttgtttaaataatgttcacaacagattgaacgcattcaaatcaatgccttgaagcatcttgtagttaaagaagagagaggctcatactgtggtgacagtggggatggagaagagtagacatttgagagatatttaggggttagaaccacgcaatttaaggtagattgggtgtaagaaatattaacaaaaaatgtcacgggtacttcttggtgtctgatttcttaatcaaaaaacatctttaagacagcaaaggggtatgttatcatttttactgagaatcaggacaggaactcaagcagggctgaaacctggaaacaggagctaatgctgagaccatggaaggatgctgtttactggcttgcttcccctggtgtgctcagcctgctttcttatagaacccaggaccaccagcccagggatggatggcacaaccatcatggtctgaaacctttcctattgatcgctaattggaaaatgccttacagctggatttcacggaggcattttctcaactaaggctccttcctctctgatgactctaacttgtgtcacgttgacacgcaaaaccagtcagtacagcgctgtgtaaaaagagaaagatttctgagggttgagagatggggggaagtatctgttgtgtgactgggattgaactactgttgcatcttgtacctgcaaccactgaactcaatagagactaggttgtgatctgatggaagggtttttgaggtcaagattattgagtctgtagtggatgcagtgcacttcagattgtgttcataaggcatgggtatctgagaagtgggaaagttgctgcagttaagttggcagatgatctctgattttgttttattgaaagagctgtttgccttggtaccacttaaagtaatgatgggattttcagtaagattggatttcagattactttaaagatatttgcagacatgcctttgcattccctgttatggagaatttattgttatgaatccatgtaaagtatgatagaacgtactttataatgtaatagacaaacaatacttaacaattacatattcaatattattttaatttgcaactccatatcttacctacttcgttattttggttaaaatctatcgtgccagatagatatttatattctcttctgcacttcaagtatgacttttttacttataactggtgagtctggggtttaattgagtagttatgatttgggttgctttgggcttattttagtcaagttcacccatatatcagtagctggctgcttagttcactggagctgatgatgcaaacggctgctttttcttctcctccaaaagcttgtttagtgttcttcgcatagagggcttctaagaacaggagtagaactgttaaagagatttgtgatccaggtttggaactgacatagaatcattcatatcacattctgctgggcaaagcaagccagaaggctggctcagatgtgagagctctgaaataaatcctatctgttaatgggagggttatgaattactttgaagagggaatctgatacaataagaggagaaataatcccagctgtggtttgaaaaaaaaaattggtctgtcacaaaattttgtgttgcaagatggcaaggtgaaaagccatgtaacaggatgctatgcttcaatatctgctcctttgcattatcttaattgtcatgagaccctaggagacgcaagtcctttgattattcttcttacgttcacacaacaaggaaaggaagaaagcagtaagggatattggctgagttccatgcctactttagtgaatgctaaaacagctgaatggattgatgagtgtttatgcggctttatcattgatagaacttcttaatgtggccatccacaaaccaagggtggagtttctagcacaggatttatcttgctctaggatgttccttgctctcctgtgccctggtggtcttgtgaaggaaggaaattggcagggatggggaaggagatgagaagcctgagagtccagccatttaaccctactgccttctattacacatttgctgtgtttgatatttttttccaccagaagagccccagggattcatgctgtgagatctcagaggttagagtaaggtaaaaagccatggggtgcagaggagggcacaaaaggcctgcaaagtttggagagaaatgaagcagaaaatgaaagaacacagagctctggtggaaaatagagaatcaagaaattgttgttaaaagtatgggtagaataagagatgtttttgaagataggtctgtaaaagtatccagtattatcagaggagtgaaaagaaagttaccagtgaagtaagtccaatttgtgtcccattgtgaaggtcataggaatgaaccataatattagaaaatactgttttagatacagactttggctaatcctgctctctagtaataggatgagtgaggaatcactcatcagaacctgttcctggtgatattttagcattacaggcaagaccttggggtcttctgattttctttaagagaagcacatcaacattaggtaaacagctcatggaacttcacaaggcaaacttctcatcactacgccttccccaacaatgaaagctcatctccttccttctaaacccatagggtaatttatcttcttttttgaactccacacacatggaatcgtactgtatatactcttgggtgatttgattttgcttaatatgacatttttacacttattcctgttaagtataattctagtttagttttagattgtattctactgaatgaagatagtatcccttatccattctacagggataaacatttggctttaggtcattccgagtatttatttgtaacgaggatgtgagattcattttgatacaaagtaatggagaatttctgaacaaaaccaacttagttatttatttattaactttggataacagtttctgattagatagaacaacaataaattgaacaccgaaggcaagctcaaaggtgaagtttggcatgacttttggtagcggaaaggtctgatgcactattgctatgtacaaaaaacaatgggaaatgacccagagtgtagacaaaaatggtcatgtggtggtcaaagcccagcagaagagagtgtgtttaattgtatacggcgatgaggcctcaagaatgtgctcagttcaggagtttagtaagattcatatcgttgggactttgtgggatgtgatggggtacagaccagaagactgcaaagcacgtggttgttgtggagaatgtgttaagtagcttagcgtctgggcctgggtgatgctcacactgcttgcttgctgtgacctggaagcctctctgctctcctgtgagcaacaaaggccagaatcccactactgtaaagtgaaatgacttgtcacatgtctggcgactatgtaccgccatagagcatcctctgtgactcctgctgtgatggagtcctgccaagggagcttagacatgtcatcttcattcttttctatagagaatgaccctcctacaagccagcttgcaggttagtgtagtgctctcggcagactgagtttcaaataagcaaagtatttgaagccacattgctattttgttcttaaatccttctttggtagctatgtgaacttttgaaatgactgagcttttctggaccatgttttcatgatccttatcacatagagttgtttctgagaataaatgaattcacatatagaaaagttcaagaacagaacctggcatgtggcgagtacatggtattatcatctagactctctttttgaagcagcagtgaatgatcccacattttccccggccgagtgcacggagtccatagccatggctgttgaagtctttggtacatcagtctgtgcatgtcagcccaactacgtgccaggatgctcaggttaggtttccaaagaatgagctcaccctcagtcgtggcctgtgtatgggaatgtagctgtgtcctgtccattctccatttcttcagtttcttccccatttcccaaagtctatgggtttttagttctttcccagcagttctctggtaaaccccgtgtcctttgaatatgtggcctggtcagtgtagacatagtgagaatttctctttcctattcattttctgaactctatttatgcaatgtaaagttataatcgttgtttcttctccacattatgctgtcaaatcagtttgttagctataaccaaagcacctagatctatacccacatttgactaatcttaaagttactccttcatttaaggactgcattgtctgcttaatgtagtttcaactgccagattggtagctgtcactagatgtactgctcaaggagtttctagtttcctggcatgtcatgcatggaaacagatttgaactaaagtgtgattgtgataattgctttactagagatgtgcaaagaacgtttggtaacacaaagctaaagacccagttctcagtggggagagaaggcaagagcagaacagtaaggatagcggaggagagaatctttgccatgacacaagatcccagccattaagaaaatggaaggaaaggattagctaagtagcaggaatgacccaattgcaatgttgtatgacacagcctgggatcatgttcactgcagtgagcagttcctgtagtggactagcaatcacagagaggagtagctggggtagattaggacaaggtcatcaaggttcacaatgttataatacaaaaggaatatttaatcctatgaatagtaagctagtagaaaatggcttaaggtcagaaggagacatgattagacagatgtaagttttaaaaatcctatgctggtagcttatagtgtctgatttgggacttgtaggaagtgtgaagtggttgtttgcaccacacaagtgtaacaaatatagcaacaatgactaacacagaacaaaacgtggaactaagaccaaggtatggccataggagcaaaaagaaagaaacattttgatagatttgtaatctgggtaaatgtcattcttgggtgctttgagtgatgagtagcccagggcttgatctgtcagaaagaggaaagaatcaagactcatagagcagattggtaaccgtgatgtgcattacaggacagggggttacaggacaatgggcttgggagaagtgaagcatccctgtgccttaaacaccattggaatctgtggggcagtcacatagaaatgcatagcaggcctttgcctcttgttcaagaaactcatgtgtgatttctgttgagcgttctgcaaagaggtattggggatcatcaattcctagtcataagaccaacgaacccttaaaaggtctagaagcatgcatgatgggactcccagaccatgaaagaaatgtgaagggtggcctcagaagatcattttgcaaagtgtgccagctggggaattggttgaaaataagttaaaaagaaaaaggtggccatggaaccaaatctaagttcacaaagcccatgcactacttaggttgggccaggcaagtggcctcacagcagttgtgcttcaggctggcctggttccttttggatgaatcctctcctcctcttcccagtagattccaattcgtacattctaccaagggtttgtggcaatttattagttcaaacggggtaatgatatctcctctgattttccttctgtttttaatggggaagaatgcaagcagaaattggctatgcagcatttaaagagaagccccactatttttcataaattcaggctacctagaaaacagcattcatgcagcatttacctttttaaaaattgaactctgagttttcatgcatttcaattatgaattcctttaaagcagaggtaagacatatttatctcaatgttcccagccctcagcacagagccccagcatccagaagtgctctgcaaactcctatttcctttcttctttaccgttatgcatctccatagttgagtaagcttagtttcctgagttctcttgaatcttcttactttatataacattgatgtcactgtgtaatgcctatttggcttcttaattttattcatcttccctccctccctatctccccctccctcttttctttccctctatctccttctctcctcttctcccctcccctcccctctccctccctacctccnnnnnnnnnnnnnnnnnnnnnnnnnnnntccttccctccctccttccttccttccttccttccttccttccttccttccttccttccttccttctttttctttcatgtgtttatatgtacatgtttgtgtatgtgtggaggaattgctcctcttcaaacactatccaccttattttcatcttatatattatttttgagacagggtcccctaccagagactggatccttctgtttcttcctccctggtgctgggaatacaagcatgtgccaccaggtctgacctctttttcagggtctccagggattaagctcaggttcttcatactagagaagcaagcactttgtaggctgagttgtctcctgagcctcacttctatgtcttttaactacttaaggtttggcatcttatgtttactctgactgttcaagtggaagggaatttattttatgacctggcatctgagagctggtaagtgaaatccaagcctaaaaagagccaggtggggatgaaaccaccagaatggactgccacttctcatggctccagtcacctctgcatcttgtgttcttctagtttttctttctcttcaaaatctccatgataataagcatctaaaacatgtaatagagcagatgaattctgaaactttttttttctgttttaattgtcaagaatttcaccattctgtgcatagaatcttgttgatgtcatatctgtcccaccctgtcagtcagtccttctgtcggtcagagtaggttaggatggttgctttgcctgccatctaggaaacatctacatgaggaggccatggccctcacttgatttgcaggtgagagcacccacctcattgctttagttttcctctgttttgcaacctgtctaagggatacatttcctgccccttcatcccttcaccctactccccaggtaacctcatatgcttccagaaacctgactatgggatctttcttgactttgagaagtttatcaacaaaaatgtgaatgtcttgctgctctttctttggatgccttctgtaggactgcaactagagaatggggggaatttggagtctttgtaccaactctaggtttagctcggttcattcaggtagttcaggacacagagggaataaggatgatggttgcttcttgcccccatatgcaccgaagcgcttcttgttttctcgctagtcaaacggggtttccttattcagaaggtttccaggttttacctattagagagtaaggaataaatggaaacttatagcaaaaagaaagaaagggcccaggtttactatctctttatctgtaccctatgcagaacacagttgaaaattatacttctcttagagtgaacagttcttaactgatggagatgcttcagctagtaaatttcaaaaacattctatttctgggtgggatggaatttgcattttaaagaaaaatatttatcattgtttcatttctttgcttgcttaggatctgtatgttttggtatatgactgggtggtcagatttgtaaaagcagcccattaagttgttcctattgtcatttaattttttttttcgtttgtacagggaatcagcagtctcttcagctctttaaaggtggtgcgccttttacgcctgggccgtgttgctaggaaactggaccattacctggaatatggagcagcggtccttgtgctcctggtatgtgtgtttggactggtggctcactggctggcttgcatctggtacagcattggagactatgaggtcattgatgaagtcaccaacaccattcaaatagacagctggctctaccagttggccttgagcattgggaccccatatcgctacaatacgagtgcagggatctgggaaggaggacccagcaaggactccctgtatgtgtcctccctctacttcaccatgacgagccttacaaccataggatttggaaacatagctccgaccacagacgtggagaagatgttctcagtggccatgatgatggtcggctgtaagtatcttttttctttctctattaaaaccaattttagtctttacagttttttttttcttcttacctctgaactctgattggattgaaatgatctttctcttaaggaaggttttaattgaaatcatttgcaattggtttacttttgattcatccctagggaataaaaatgcaaggaatgtattttactctttgggatgcattagcacatgaaaaactgtgtgtggggagtgatagaaaactcagattgggaagtctgcgatttgattccatgcatgttgttgtacctggcagctctggagaaagaactagctctggtatctagacaggaggtgtctggcacattctgtaggttttgttggcagttggattcctaaaaaagcagatgggatatatatataagaccgtaagttagaaaatattttagtcaataactgaatttctgaattaaagtggacttcaggatacagtttgatgtattttttttattttaatttttttataatgaagttagcactgtagtcagttgagtttgtgacaaagaatgaaagggttggtgagctgaaagcctgcagcagtgacagagtccaagactcagtgtgcgtgcctgactacagtgacttgacaatgctcttgaaagcagaatgccctttcaaagagctaaagaccatgtgctttgcccccacgttctgactgaatgacagcagagttccagacatgaaagatgttcaaactttagatgctgttttaaaatgtctcgaaggaaagtttccaggcatctccaccttcaagctgacctagatgactcactgaagcccagttcagccaccaaaagtaacttcaagattgtgctgaagacgtgatcagccttgacacgttttataagccttgaagtcattattgctggtgttttgtgtagtaatttagtataagccttcttctcctcctccttttttgaggctccaaattatagagctttagatgtgaacattcatgaaaaagattcagagtctaggccaatgattctcaatcttcctaatgctgcatatctgatatgtgaaccctgtgaggcttgcgacccacaggttgagaaccactagtcaagacattcatgcctcagagagtccagaagctactggtgttatgaaatataatatagcacggaggtacctggcaggctcatggcaaggtaggcccctgagcaattatgttatgcaataaatctgctataaaggaggtttactaggggaagggagaggagcgagggcctggagaaggggtagacaaagggacatgtagacagacagatagatgggagtagagccatgagggtagagatgaggtagggaggcagacaaggacagaaaggggaaagagagaatgtggaaacagagaaagagagagaaaatgtgggaacagagagagggaactggagtggcaggcagtccttttgtaagcagcccacacttggaggcaggagccagatgatgatggaagctgttgctagttccctgagagaagccttgtggagtaacctgaagctaacaattgaaacactagtgttagcaagtgtttagttccctactttagttattatgtattcagccacagagacaagagtacccaagttctgagggtggattagggcttcagtaagatctaagagtagaatgcaagtgttgcctcttctaagggcctttgggagggaggcatattctatacacaaagagatagatccatggtgattcatttaatgggtactcatatcaaaaaggtatttgggcaatagtgtgataaataaaatgttctgtcacatgtagaattcagcactatgctgcttttaacatttatgaaaggcatgttacctgatacagtctagaactggctaacctttctgaggatattacaaatggactagaaattgcagtggttgtgcagagaggggctctatttgctttgtcttgatttccttcttttattcctggaatatggtatcagaatctacagtatatgttttgccacaggtgttgattcttgtcattgtcgttgcagggaagattcagagttgggagttgtggatagaggtccgtgtagtgtgcttgcatagcatgaaaggccctgatcattcttagcgacagcactgtggtggtggcttacacgagatgtcccctgtagtcttgggcattggaacactttgttccctcattgatagtgggaagtttaggagacatggccatgttggggcaagtgtgtcacaggagatggcctttgagagttgcgccatttctacctagctcttcttgcttcctacctgtgcttcaaaacaagagctatcagattcccgctcctccttctgtgcttctgccccaccaccgtggagtctaaccttctggaactatgaccccattccttccatgtgatgctctgctcatggtgttttattactgtgataggaaagtaattgatacaagccctcaaagcaaaacaaagcagaaaaagactcataactgtcttaacaccacaaagaccttctccatgcaattacggccctcccccaaccctccccagtctcttcaaactaacaatctattctacctctttattattttgtgattttaagataataaagataaaataaaaatgaaatcatgtaaaatgcaacttttaaaagttgccttttaagttccagttatacctttgagataaatgtgaatggaatttgtcaatagctttcttctgggttgcattttgtggtttggaccactgctgtttaaccattcatctgttttagaacaccttaattaaattaaacattctaattgtttatgttccctaagacatctccattgtgtgtattcactgttgatgctgtgttatgtgaggatacctcaccacaactgtatgcttttcagcgaacataacccttcacagccttctccctcctcccctcccattagggtcctttattctcttagacagatttcctctgcttttatgacatgtacacatatatgattttatataactatatgaaacccaaggctgtaaatgagggaagacactaagtatttgtctgagtcttgcttaatttaattaaagagaatatctcaattgtacttatttttcttcacataaaacacttttctcttcctgtctctctcacatatggacagtcttcataccatgttttctttgcccgtccttctgttttggggcagctaccttggttgcataacttacctatcattaagaatgtttcatgaatcagtaaacaatcgcagagctttccctttctccttccaagagactgcatgaccctgtggactgcccgtacctctgcctactatgaagatttcccttcactgatatctttcagggttgtcccagaaacagttgtaacactgcagctgccaatttttgtgtggtgattgcataaccttgagaaccatcagtaaaacaagccctagtcttctcttcctcactcaccatggggcacatgaacttacaggtgcactcctggcagcagacagcattggttgtaacaggagtagaaaccatagacaactttttcatatgacttgcttgtgccttcagaacctgcttgggtctgatcatgtatagaccagttgcatttgataattgattactactgtgaacatgctactttatagcttgatgggtcagataaaatcaagcccatgatgggcagatcaggtttcagtaattcactgtcaaatgttctatttctactaaggcccagtagcaggccatgagctgtctatcaaaagggagaagagttgtttgcagatgatggtagaaccttccttcaaaatcccaaatgtctcttctatgattcacctgtagaggcctaccaaaacctccaaacagcatccctatctgccactgataccccaggtaccactggatttactgcatcatatggtccaagtggtagagcatcctgtgcagcagccttgacctgttgataagccttctattcccggcccactcaaatctaacagctttctgagccacttggcatatgggccagggtaacacacccaagtgaggaatgtattgtctccagaatccttataggcccactaaacatcatgcttctttcctggtggtaggacggactaagtacaataacttatctttcacttgggaaggaatgtctctgcatgtgccatatactggactactggacttaagtatttcaccaaggtagaaggtccttcaagattaattggattgtgtgtgtgtgtgttaccaatggatttacagtcattgatatctcctgttcacttggtccaattagtataatgtagtcagtataatgaaccaatgtgaaatttgtagaagaaagagacaagcaaagttttttccaactaagttataacacagggctggaaagttaacatatccttaggaaaaactgtaatggtgtaatgctggccttgccaactaaaaacaagttgcttttggtggcctttatggacaggtacagagaaaaaggcatttgctagatccatagattcatgcataccatgtaccaggagatgtgttaatctgctcaagtaaggataccacatctggtataaatgctgtaattagagtcactacttgattgagctttcaatgttcaactgttattctccatgatccatctgtctcgatggctagataaaaatgttaatgggaaatgtatcgggagccatcacccctgtatctttcaagttcttgatggttgcactaatttctacagttcctccaggaatgtgataacattttttttcattcaatttactcttctccttgaaagagaaaattctaaaggtttccagttagcctctccaactgtaatagccatcactccacgggacagggaaccaatgtgagaattctgccaaattctaagtgtacctatcccaattatacattctgatatgcaggtgggtttgagatttatcaacttggattcctttagaatgtttctactttgaaggaattacagataaaggtgcttggatgtatgcagttatagttttgcatgaacctaagttcttaattctctgtaataatgcctaggatcacaagtaagtacatatttcaatattaaagaatttgccagtctctttttcaagaagggtagcctagaatatcatttcctaacataatcaaagtaaaataaaaacaatgtagaagtgtaaacacattcttatttcctttgttcatcaagctacaacttcctatctaagaccaaatcaatgttgtccgtagcttggaccattgaagtagttccctatattttttcttccatagctattcttatcctagaatctgtctagactctagaagctagagtaccccctttaaaagtaaaaacacagcaccattccttagcacagatatcgctagtggatataaaacaaagactaaattgcttactgtttccacatacatgtagaaatgtatttcattttacttttatttgttctttgagaatttaatataaaatttgataatatttacccctccaaacctcccagatcaaccacattccctactctgatgtctattcttggttatcaagttgactccatctggaattaacccaagtggcaggatacacctttgagagacttttcttaattaaatcatctgaagtgggaagactcacttctaatccaaatctcttgaactggaaacatacacctttgatacaaatcttttgaggtgggaagatccacctttcatctgggccacaccttctgcttccagcctctataaagggattggaagaaggaggcttgctctttttgcctgcttgtttcggctctccctgacaagtccattccttcactggcatgcgatcctgctcctttaggattctggcatctactgaagacctgctgagacatccagcctaatggactgagcaactattagattcttggactctctgtttgtagacagtcatttttggactatttggactgtagcctgtaagccattttattaaatcaatttattaaataaattttgtagtgtatcatccatgctacgatgtgatattggtgatacagctgttgttgagtcatttctgctcctctaaatgatagctcctttatattcctgtaagtaactccaataaaatccattgattcaccaagttagactgtggtggtatccatacatatcatcagttctctatctaggttaagtaggtgtttgtacccatctgttcgtacctctgttggaaattctcacacaatttcatttgggttttcaaaatgccattgattcatagttgattttattttatttttctatgttatgtgtggctgactatatctgcaagatctagatttcctaccctcttgttttcagtccctgattagttttaagcctggccaccttcttccttgagtttctgctatctcatttcagtgcatgaatagacatcttttcatctattctggtacttagcatcttcgtgccaattggctttacatttctgtttaagcctctgtgtgagtccagcttctatagccagactgttccaaggaaatgtattttaatattcttcttagttctgcagtctgtagtgcttttgtggcatatttcccttcagataaacttagagggttataaaagtctttcagactcatgaagtggtataccttgaacagttccaggctttattacacatgtatgtacagaatataaaatatgaacactgcagatgtttgtaatcttgttttttcttcatttaatactactaaggaaactaagcaaaaatattccactgctggtatcagaattgagtatgttctgtccatccatcatggacaagaatttaaagnnnnnnnnnnnnnnnnnnnnccttcccctccccctccccttcctctccctcctctctctccccatccccctctccctccctctcccccctccccctctccctgagagtgtttatctttccatctctttctttctctttctttgatgtgcatgtgtgtgtgtgtttgcatgtgttgtgttttgtgtttattgtgcttgttttattgtggggagagcctcttaaaattttaatgtgatgcaacaatatttagagattttagtggtagctaatccagtttctccatttgagtccttttatccttttgtggtgttttcttttctgattcttatgttcttaccatcgaatgctaagttgcatgttgactttgtctaataatttaaccatatgatcttttgtgagtgagtaccagagaaatctttaaggagaaattatgaatgtaatttagttttccttgggagaatgtaaacacaaatcttttcatctcatatatggcactgaggactgcctaaaggaatgattgctctcatgtctggtttgagattgtttgagttaattatagcagcactagtgactcaaagacagcatctttttcactagaaatcccatctttgtatgtgcgctgattccagaaaactgcagctctgcatctcagtgctcatcttgcagacaacgtctttgaagagtctactttctccagaaatttcgtactgcctttataacctttgaaaggaccttataaatcttgtaacttcctgagtttctcaagtgagtttcatgaacttcctgcaccttctaagtttcctgagcttcctgaatcttagactctgtcctctttccacaaaggctgtttcaatttagtggaaatagttatgtagttttggcccattcctaaggtatctcagctaattcccatgtctctaggataataatgcatctctgttatctgctattggggaagtttttaaacttaaaactcattcaattctaggcttgcccaacgtggaaaatctatttgttcagcctgaattgattttttttttgttcttctcaatatatgttttcattcatacttttatgacttcaaattgtctctttgtagttttggcatatttcccatctggagtgacatctatagttctgggagtagctattaccttaacaatttagtcaggtcttttccagtgttccacatctgtgtatttgtgaatgaatctgacattttgttcgcattcatgaaactcactctcaaaggctgttagtgctgttagtatcacagcagttcagttctccagcggttgttgagaataacagatttgtttttgttaaatcaagaggtgggtaatctctttgctaatttgctcagtaaatacttaatgatgctttcgtgaaatggtttctaatccacttaatttacataatcttgttattgaatcctaataattttccattttctaaagatcagcagactgtctaattttgcagctattcataaaacaccttagtacactgataatttgttttgatggttataaaacaacaggatctgagtgtagatttttgttttctaatgtgattatcctcttaatgtatttttatgaatcttcttctaaagattcatcaagaaagcaatttacattattactaaattatcatataacttacattttagcttaatataaccatcacaaagaactctatatttgcctctttattacaattttataaaacagagaaacacgaatagaaagtgagttacagatgactcttgttcataaatagtatttttctccttgtgcatatttgcatatgtataattgtattaattgtccattgaatatatttttaagtttacagatataatgcatcaaagggctaccaggttggattttgagcattcattttatttaaaacattacttattctttctactattgtttgattaagtttcagattgaggtagcttaactcatatgaaatgtaacagtgagaatttattctgcttcagggagctttgagaagctaagaaaagcaagactgaaagccatgaacataaataaattgttgaggtttaattggcaggcaagaaacccagttaataatgatgatagtgtgtacagttttccaaaatggtatcattgacggtcacttaaacactctagaagctttttgtaatggacaagaacagtttacaatcaagcaggaaaatggtttggaagatttattagaatggcaagcccacctgccaatgggatgtatatgatgggaaatttgactttccatgtaggtagtaagggttactggggtgtgttcggtcacacagtagtcatcatcagagaccagctccacacatccttatcaatagttggtgagctcactcatcatctctgtacaattcatactatgagtcaagtgaggttatggactttgtccttgacatatcctcacttggaaaaaaacatcaactgagcatagagactaagagaatatacattaattgagtacaaaggcctgagggaccatcttacagtcttcaagtctctgtgtgttttaattaatttttcaaatgttaagtgcaagaattgaatgatggtatttccatcactttttttttttaaatgctgacatcctagcgtaccttctcatggtaataccactgttcattgggtggggcacatgattctgtgaaaaggagatggcatcacaaagagtgccattgctctatggagaaaagaagtgtcttctatgcaacaagctgaataaagagatgagaggaaaggttgtcagggggatatcatgaaggtaagaaaacatgcttttgcagtgtatttggaaagggaaatgtttttccacatacaaatgaggcactgggaagattgaaatgtacttgacttggggcacaaaagacattttcacatgcacctgtggagacctatgaggttacctgacctagatggattcacagaacgactttaaagtgagttattgttctattccaatattaaggacattcttccaccaaccgtcatgtaacaattgagttagctcaggtgtaacattaactgctgtgttacacggtctcctgagcctgctctcgaggtgtaggagggaaatggagtgtgaacatgctcattttcacttgggtttcctgcttagccagatggggagagctttaagcttggtgtttattttggaaactgggccagttctttatgttcgctctacccttgcctgtgagaaagatttttgcttttatcttctctttcctttaagaaaatgagtatcccatgaggtgacacattttgtgaagctcacagttcatagttctaggtagttcttttatggttaatactttcagatgtagtccagtggtttaaaaaaagaccatgtgaggtgcattcttgtccccatctccttatcaaaatagaactgctctttgcaggaatgttctttcatatcctgtttcttttgatgccaaatcacatttccacaaggcctgctagaatatgtaaagcttttttccagaaaacagcaagaaatgttcttaatggtctattaagaagcttgggtggggttgagatccaggactcaggaatggaattgtgaattactaagagttctttagtccatttgggactacagtagctgttataaagcactggtatgtggctgccaatagaagcttcttggcccccagtgagcttgttaatattcagtgagcttttcagaacgtcagagagaagtactgcacctctctctctctctctctctctctctctctctctctctctctctctctctctctcccacctcatctctaccttcctactgatcacaatgtccatctcttcctccacttccagcttatctctgtagaccaggatccaagactttgtaggaatgaacaagagactgagctcccagctacagtgtctgttccttttgttgttgtttagttgaaaacattgcctttcagtggatagctgtgttcactgagacaatgttgagtgtgtaaatgaaatgatatagtataacttagaatatgttgccaaggagagagagagagagagagagagagagagagagagagagagagagagagaggaaatactttggctttttggtagaaacttgagtggaaagcagatgtgtctagagagaaagaagggaaaataagatatcaaaaggcttttcctcatttcaggagggctttgactattatcctaaaaggtctgggataagcaaaagaatttggttcttctgtgtggaagattagttcaagaagacaatgggtattggcaatgaaaccacctaataagctgttgtggtagctcaggatgacatgatgaggtgtgacctgtatggaggatgtctaaatgtagagttggcatgttttgctgttgttaaagggtcacatagtaactgttttagggtttactaatgataccatcatctccattattgtattgctggaatgtccatagaaaacacggaaatgaatgaatacaatccaactttgaacaggtggcagactaagcagttcactgcttgtgagagactgtagacttctgaggctggaaacctgcgttcaaatgtttcatcatctcttataagaatttataccagctttctaaggtatgggccatgaccctgtgactgaatgtaaggtacatggaaatttggtatcagtaaaaggtttgggaatgtgcaaagatcaaacgttaattaaatcagttgcagaagggctcagaggtgttttggcagtgcttgctaatgctgcactgcagttctggttctgaacagacagcaaatactctctgaaccctgcaccactaatgggtcctgcatactacatagaaaattgttattttttatgacttattgtcagtaaatattcattttgcatatctattttatatgcccacattcttggggttgcataaaaatacctgagcaaaaaggagaaacaagtggagaaagtttaagaagcttggggataagccttcacccataagatgtagagaacacaccctgtcttgtcttgcagagttatttgggatatccatttgggagagcctatgaaaaattcctaagacggattttaaatttgtagttgatgatgaattgagtgtgtggggtactagagaagagtctaaaaggatgcatagatttctacaaattcagccagatgagctataaagcacatttatgaggcagaagagaaggaattggcagaatgatgctgcagccagaggagatacctcaggtcctcaggctggagggcttggttgggccattggaatgtgctgtgggctttcagagacctgagccacggagaggtggctctaggagtcattgcctatagaaagtaatgggtgttcagacaggagggacatgaagcttagttgggaaaggagagtctcgaagtgtgtaaagaagagagggaacatatgcttaaaaattttctcttgggttataaactaaaattgagcaggagagaactttttactcagaaaagaggtatattttctcattacatgattatttattgatttccagtgagttcaatttgacctctaaggagctgtgcacgtctcaggacagactgacctgggaggcaaggggttgttttttgagaaaagaagcctcatagggtcctcatacaggtgtcatcaagagtcaattgacagataattttagtattgcataaaatattatttttcatagattggaagacttataaatgtacatatgagtatatttagtgctagttaaaataaatatcacagcctttatgctagagtttcaaaatagttttgctgtgcttagagaaggattttccttgagatgctttctaagccaacttctaagtcactggcagccagggatgcagtgctaccgttgggttgtgtgtgtaggaaatatgatctttatgtgatgaaaactacattcagtttgtcttttgagaaatgctggggacatcacaaattctctttgaaggtacagctgccctttcagaagcagtttcaacagctgccttttggactctaccacctttaaagctgaatttttatttcagaacggccagcattcataatttgtagaaccctaatctggaaacattaccaatttgaagtagttgggaaagaaaaaccccttcattggtatctggagtcgggtatagactcctcctcagagagtttgttagaggatttgtacttctggccatgttttcttgttttgagagggacttgagtttgtctaccaggttcctcagagacctgacacctattttatagctgggtttcttcaatgtctttctttatgagttcctaactgagaacagacacctttcttctgtcctcaagtaagttccttcaacccttactgcgtggcatcctcagacttccccatctggatgctcctttctcatctattctaggactcctagcagcagctggaattaggggcaaacgaggtaggtgctcctgaggcctatgtttatcagcattacccttttcaggctcctcccactcggattcgctcttattcactctttctagctcccccaaacctatgaccacccttctttgccttagttggtgataagatggtagctcttacagatggagtttttaaaaattatttcacttttgaaccttctcatacagtctgtgtgtgtgtgtgtgtgtgtgtgtgcatgcatgtgtgagtgtgtgtctgtatgcatgtgtgaatatgtgtgtgtgtgtgtttgtgtgtgtgtgtgagggagggagagagagagagagagagagagagagagaggtataggatagcttttattctgagtcaaatacaaaggaagacttcttgttctttgttatcattgtcttctccttcttcatctgtttcttcatctgcttgttcttccttctnnnnnnnnnnnnnnnnnnnntgtgaatatgtgtgtgtgtgtgtttgtgtgtgtgtgtgaggggagggagagagagagagagagagagagagagagagagagagagagagagagagagagaggtataggatagcttttattctgagtcaaatacaaaggaagacttcttgttctttgttatcattgtcttctccttcttcatctgtttcttcatctgcttgttcttccttctccttctctttctcctcctgctccttctgttcctcctgttcctgttcctgctcctcctcctcctcttcattctcctcttttcccttcttcttttgagatagggtcttgctatgatgtccttgaaccctttatgctcctgccagagccctgaatagtggcatgattttcctatgttctctaactatcactctaatgctgtgtgaaaaaaaatctgtaagggttaaagggtggaagagagcatgatgttcaatagttaaggtaagagatgatggtggtagttggaaatgattcgattgcagacttgtagttgaggcttgtaaatgggatggggctagggagagaagaattcacttttaattcactggtgtacgcagctactgtactgagccaaaggtgctcttttgtaatgtcgtgtggactgttacatatatggctctagaggttagtaaagtgagccaaagtgtggttagatatgctttgtagttggtttctccctacaataagtgctttcatttgattctgctctttggcacctcatccatctcttcatccccatctctacctctagtccggagacatgattttgcctcctcaatccatggaaaagcacacatccatgtgaataaacacccagccttgcatcctccgtctcatgcacctgcccagtcttccatgttcatgcttcctaaaggcttggcttcctgggtccatttactttctgttgggagcgaacctctttccctgtcctgcagcttctcttttttgacaggcttcctagacacgttctccccatcgtgtgaccctttagcgattttcacccttctctgttgcctccttacccacttcccttgatagttctctgtgttgccggattgcctttctccaaaatgtcgaaaactgtgatattggaaacgaatcattgacagaccaagggcagctgccctgagagcctgaacagtttttctcacagttgctacttagtgagaagagctggctctcaggtatttctctgatgatatggtctgatagttctacaattagaaatcctactttgtatgtccttgatgacagaagggcctctgaaactcttttccccaaacagatgtaattctctatctattactagttccttgtcacaataaagcagaaacatacaatgagatcactcaagaaggtggaggaaacacacgagcctggggtgtgccctttgggtgggacaggaaggagctaaggctgctcagtgataccaacaaggaaaagacggttcagactcctttattcctaattctttggtggaaaattaagaaaggcttgataatttacagtgctttgtctgcaacttactaccctgcagtctatgttccctagtcagacggatgttcctgtcacatcagatctcattatcttgttaaagtctgtaactgggtcctttcatttttttgtgtgagtgtttattacttgcctctccaattaagataggagtcacaaagtcagagaaattgtacagtccagatctgttcctcaggagtgacaggaacattattttggaagagatgagtgaatttgatactccatatttgaaaagtggcccaaaccacacagctccataatagtggtttccaatgtatggaccatgaatggagaagcagaaatccacgtctgatttcaggttttttatgaacagaggttcgtccatgtcctctgcctccttttgtttttcaaagcaccctcaacagcactgtctacctgttcttttttgttggctctttaagggattcatacagcatgttttgatcatatgcaataacaaattttatccaattcatcctgcttcctacccagttctgtgtgacttaaaaaaattcaagagccaatttgtgataccccaatattcttgagtatgtcctctactggaggaccatcaacttgccagggctataatcttagagaaaactgtctttcccagtaactaaccattaccaatagctccaaggcactgaggtgatactgtgttcccaacacctctctcgctgctaggatttgttctggcttgggcttgcacaggttttgaacatgctgtcacagctgttgagttcatatgtgtaactggtttgttgtgtgcagaagatgttatcttgtccccaccactctaggctctcacactctttccacctcttctgcaatatctctgagcactccaagttccctctagggctgacagttctgcagccatttatttttggaaccttgggtaattgtaggccactgacagtcacattctctctctctctctctctctctctctctctctctctctgtttgtgccacacacatgtgccacatcacacatgtagaggttagagcacagtctctgcagctgggtttcactttctaccttgtttgagtcggagtcttgtttttgcgtgtccaaacattctcctgtcctcttttcccatctggccatgagaatgctgggcttatgggtgtgtaccataacatcagactttttgtgggttctgaacccagatttccatgattgtgaggtgagtgcttttcctactaagcaatctctgtggtcatgcaggctgctctctatgtaattttccattattctgacttcctagccttctgcatagcaaataggatatactctttgtttttggatttccttcaacctgctttgggtctctgctgtcatctcccagacttgtattttactctctctgcctccttccatttttggggggggggggagtgggagaaagagctaagattttagcaatgaataatagaacaagaacaatagcaaagttattttctatctcaagggcctggcacttaaaaaaataattcatgctttcaggataactgttttggccctaggctttaagatgtctcatccaaaacccaaagccaagctagtcttttcattcttagcagcagctatactgatcattgaaaaatagctgtcagtttccacaccaatcatagaaaaccgactatcaatttcaacgacaggaaacagagtggcaattagggaggcctagggagtataagaggaaacattcctgtgtttcttctccttaaccacaactaaatctggacattaatgaaaattttattattttattttatttatttttgctcattagcaatggaaaaacactactggagaatttaaatggtttgcaaacaattacctgtgtcacaaatacagtttagacaggggctcttgcaggccagattggctttcaactcactctgtagccagggtgatggtaatcctctggccttcaattctgaggtgctatgagtacaggtatatgctaccacatctggttcataccgcgttggtgatggagcccaggccttgcatggtaggcaagtactctattaactcagctctattccaagccccttgagtttagttattcagtttgactattctcttcaagaaaggggaacttaaggtcagcatgatttcaatactgacttttagaagcacaaatatgcttacttatttatttctggttaagtgaagagccataaccatatatgtgtattttaaagaaactttaatcacaacaaaatcacattcatttatccaaggagagatctccatggcttctgatgtttgagcccagctttcctgtgatgaagggaatctacttgatattttcatcatttagagtagttcctagagaaaataagggaagtgatgggatttggttgatatgaaaaggacacaactgagagaaacaggaagaaaccagacacatagaatggggaggggaatccaggtattttgtagccctgtgatttacctgattcttttcttttactcttttcttttaatcttaattctataattcagagtatttgcatgcatgaaaaattaatttaaggggaaatactagagctatagaagttggtcaggaggggatgaaatgttacttgaaggagtaattgttaataatgtgcacttgtatatctaaaaatatcatagtgaaacccattagtttgtaccattagtatatcctaatagaatttgtttttaaatcaaagtaacatgttcccatttaaagagcaagtaagtggatagtaagatttattttgaagaatagaaattatattttctacacatattttcctatttcccagagtgctttaatgaaatttctgggtttttttggggggggtacttattatctatattattagaggaattattttggtgtcaacactgtctgttggtgtctgtctctgaagaattaaattatagtattttttccttttctccatgtcttacatttccatttttacctttcttatgtattctggttataattgtgatccagtcacaatgttgctttcattattactgctatctaaacaccttttacaaccaaaccatgtggtgtactctgatcatgtcccagaacaacactgagttctctctaggctaataattgtcattaacttcttttctttgttttccatgtgcttcctttaattccatcattaaagtttcctcctgtacgtaatttgaaatctcagggcaatcagctggacagttgtagctttgctttttggtttgtatctttcctctcactttatccagcctagactcttgtctatagactgaacacacagctctcagactggtactgccattatggtctccagggtcattttgccttctcttttgtgaatcctttatatgttagatttagtttttctctgatattacatcatgccttaagctcatctcccaaatcacatcttttcctaaccccatatattatatggattaatattgtaagataaaaattatactttaggttgtactattggcctaaccttttcaggttatgtttgagaattaaagaaaggtatgatctttaccagcattatggataaagctggatcaaaatatcttcaatttcttaaacttaggatttgatttattctctatagaatacaagacagcaataaaagaacaggaataaatccattcttagtaatacagctaaactgaagacaattgggcctaaatttcctctctttaatggacaattcatgcctttagttcctgactttaattgacagcattctgtatctgtgagtgactcagcacatcactatttagattttattggcaaatcatagatgacatttcagtttggacttagacaaatatattgtcagatttgaatattgtatctgagctcgattttagttaaaaagcacttggattcctatgaagttgtcccctgtgaacactgctatgtcagcatcactgttaaaatctttggcttgacttatacacccaaaaatagatgtatggactgtggggtctacttaattggagaggatgaaacacgaagtgtcttcttgttgtaccaggaatttttctgttgttagaacttggcctattgaaatgaaagcagaaaaagtctgacaagtcaaagttaccatgattggtagtaaaaggaaaaatttgaaaatattatgattgtattctgtttctgtggtataaactgaaaactcatacgcaggggtagaagatgacacagtgggaattaaacatggtaatgaatctagggtaagcagtgctcatgactattccaatctgtagatgatgagctattgaagtctctgagaataaaattacatgatctggcatgttgaaaagagtcagactgatcattgcattgaccctaagttctacagtgacaaggtcagatggggaagacaatctagggaggttagtgaagtagttgtagtgagatgtcatgatttcttgacccaacaaagtagcaatggtgagaagtggttggacactagttatgttatgaatatagagccaacgagacttgttaacacatgaaatatggggttaaaaatatttgtgtgtgtgtgtgtgcacgcgcgcgcgtgcgcgtgcacacgagtgtttgtatatgtgttataaacatgcaactatcacagatgttagggaactatcgtatttcctagagctacagctaggtggttgtcttcagtctcatatgagtgctaggtatcaaaaccagatcctttgcaagagaacaagtgctgttaactgctaagtcaactctccagcccctagatgtagggttttaaagtgatggagaaattaatgatgaccacgacatttgcttggcctacatacatctaaggaagaggaagaatctcagagattctggagggattgatgtggtgaaatgaggggctaagttttgaaaaggcatattaagtttgagatgctggttaggcatataactacagtaatctagtagctctttctaatgatgaatctaggtttcaggaacagctcctgggatagtaacagatttggaaatggtgtggtggtgatttaaaagtcaaaggagttgttgcagcctcctcatgatagaggataaatagaaaagaatctcttgtgacttcccatagctagcagttggcaggcagagaacaaataaggaaatggaacacgaagggagcattcagaagtcaaaaggttctgtgggaggaaggtgcactggaggccagcaaagaggcatttgcaataggggatgtgtgatcagttgaaggtcaagcaggacaggatctatagaagttgatattctgcaaggagtgggatggtcatcagtgactttgtgcagatctggtataatcccgaggaccaaagctcttgccgacttaccagttacttcatttgtaaagtggggtaacacttacttcatcaaattattgtgcaaactaaataaattaatccatacaaaatgcttagaacagtgcctgacaaaaggtttgttgcttttggaaatgagtcttcaagtactcattcgctgtctgtcaagatctcagtgagggcacagagctaattaggaacctatctaccttattgaacatttaatccacatataatccagtaaagctaccagtgaacctatgaccagagtttaccaaaacagaaggaaatccaaaccatgtctactgactaagcaattttgaagttaccattacatattttctttttttgaaagagagtctcttattgtcatggagtttgtcaattaaactagactgcccagccagtaagcctcagggttccttctgtctatgccaaccccaaactgggattacaattgcatgaccaaatacccagtaattttatatgctttctgtagctcgaacactggttctcctgcttgagagacacgttcgttcatctacggagctatctccccagtacgatttggaatatgattatttattttcccttgttgcctttttttgttttcagctcaggttcatttgtctcttgtcagccatgctaattatgtatgtaatctagtgccaacattattctatgagaaataggtgaaggggagagtgggagatgaggttgcatgttccttgtcacccttcatcattgacccatgccaaagaagcaggtgctagtgattcagttctccccaactccattcatttatcaaagccctttcccttcacataattgtactggagataggcacctttcagaagtaagaaagcttaaatgagcccatgagataaagttcaggcttgatggacctgttgtccttacaagagaaggggaaggggtggtggaggtggagcccagaggtagagcacttggttattatggccaaggcggttccttaatgacaaacaccatgaagaaaataaaacagtgaactggaagagacaccaaggctgtctttatccatctggagcagacatgtgggaaggcagccagccattaaagccagagagaaggctcccattgaaaccctgtttgccggcaccttgacctttgctttccagccttaagaactgtaaaagataaatttctgatgtttaagtggcagaattttgttatggcagcctagatgagacctttcttctgttgccttgacaatcattctgtgaagcatcggtgtcatgtggaacttttcctttcctgttagtcaattcactgtaagcatgggacatttttacatagtcttggatctaatggagcatctttaactgaaaaccctaaataattcctactgcccaagacatcagatccgcagcatggacttttctgcttcttttcattctcccctcctcctttcttctccaccattttccttctaatctgttgacttgcactgtttcctgtggaacgttgactgtaagatatccatccctctgttgctttgccattgttaatgtttgtgaaagtcaaatggccaaaagatcttatcttcctcggtttgttcattgatcccagatgccaagttcttcaaggactcttctagattgtcccaggtcatattttattaatgtgagaattattatatcagaaatatacaagggtttttatttacaatgttgaaacccataattggaaatctgaccgccagttacaggctagttttttttaaaaaggtattgtggccccatgttacagttgatggatctcatttgtcatctaggcacaaaggagatgtgcacttcactggcgatgtggggcaggtgctcatgacaggggcagtaggaaatgattggttactgttttattcatttctcttgtaccgtgaaatgcaaaaaggttatgcatttatacttacacccctatgtaactttatacacattattatatgaatatatatgtaaatatgtactttggactgacacaaatctaatgttgaagaacatttattatgacattcaacaggaaaaatgaaacagtacattttccgagaatttttaaagagcaggaggaagcatttagatgggacattaaatatgcaagctatagtcacacaaaagaaataccatatggtttaatgccatacattggtttgttttaaacctttagaggtttattttcaatttgaaatgagagtgtgccttaattagtcttgaagtgggctagcataacatatgtcttaaacagtcatttacatagtagttttcctttcctttatttatagatttaaattctggtaagccaacaaaatgtagttcacagacaacaggcaaccaaatctttttcactcacttgctaattattttcatatttcattgaagtatggttgacagatagaacatacatttgaaggatattacttgatattttagcacctattatgcatattatatttttcagtaagtgattgtcagaaaaaaatctaattttcatatttatcacagttacactgtatatgggggtaagaaatggggagaatccttcagatctagtttcttagtatatttcaagtataaaagacatggttattaattgtgtttactatgctgcatattgtttctccaagatatattttaatcctgaaagttcatgtcttttgatcaatctccccattttcccacaccctggctttctgtgaccacatgtctactctgtttctacaatgaactgtattgagttcatatataagtgagactatacattgtctttgtgagcttggcttaggtcacttagtgtagaatcctctgagttcttctctcttatttcaaacagcagggtcaaggatgaacccccacccccagtctctttatctgtgtgcaggctagttttatttcaacttgacccaagctgagtcattttggaagagggaacatcaattgagaaacacttccaccttcctgagcaataggcctctggacaagattatagagcattttcttgtttgaagtgagggggtgggtgaggcaatttaccatgggtggtgtcctgtgctgatagtcctgggttctataagaaaataggctgagaaagtcatctggatcaggccagcaagcaacaatgcttcatggcttctgcatcagctcctgccttagtgttcctggcctgacttccctggatgatggactgactacaagtgtaagatgaaataaaccctttcttccccaagttggttttggtcatggtgttttcacagcaatagaaatcccaagtaagacaatcttcttacctttgatggacactgcagttgtttcaatttttggctattgtatataacactacagtaaacatggcagtgcagatatctcgtcaatatgtggatttcatttctatagataaatattcagaaatggtatttctagctgtatggcagtcctatttttttttaattttgtgagggtagtttccataataatgtcatcaattaacattcatcccagcaatatgtaagggtcccttttctccttaccaacacttatgttactaggttttgttgacagatattctactaggtaggagttgacatattgtggttatgatttgcatttctcccataactggtggtgatttcaaacactgctcagccatttgcatttttcttttttgttttctgaaacagggtttttctacagccctggctatcttggaacttgctctgtagactagcatctactcaaatgcaaacactacttctctgtattgtgaaagacaggcttaatttttctttcttgtatttataatagttataggtctttagcacttttttccccctgtagattaatgagtagttttcaagtagcaagagagagaaaaaaaatctctgtgttcctgaaaccttgtttaattatggagcatgccaagcccccatttgaccaattttgttgttgttgttcttggtggttttgtttctcacctaatgtaagcttctccactctgccacaaaatgtgtttcacagttctagaataaggataaaaataaagtaaatgtttgggaggcactgtgagacagctctaggtagagagccacacaaaagtgcacagttactggcaggaatggctaattaattgtgctgcatttaagggatagcatggagcaattaatgcatttaactgcttcattgaaacagaaagctcttttgcagcttgcataacctctttgtataatgagaatgcttcatgaatttataactgactgtgtgacctctgattagggaatctggatatgcaactatctctacatttttattttccagtgtgtaaatccagacctgagctctggactcttcattttgagttcttaggaggagatagggaaaaataggagagtaagattctttttaaaaaatttaactcatttgtatactttgtatttgtaaacccatgatttaatgaatcttattaggcacattgtaatttttatttactgtgagcataatgccaatcatttgtattttaagaaaaaaattgattaagggcaatatcgaatttatctgttttagagttggatgcaatatagtcaaggtccagagagctcaccctggcactagaggagaggtggggatgtaaacaggcagatgctacattacaaggcagctaggaagtgagccccatttctcacacttagcactcttggtatattgtattttctagtcatgagaggttctctttttccgacttatcaaatcgcaaccagaataagttttccagagaccagaaatggaatttcagctttcttctctaaggttgttgacacatgggagctgggatttatcagtattctggctcctgtgtgtgtccctggccttccaccccattcgtcttcaccactggaagcctccagttgccttgccagtttttcccagtgggagtcagaatttgaaagcagggttgagcacagttcatttccccattcatttggctgacttgattggaatgctctctggatgctcttgagtccagcttaaatgcaagccttcggctatgactttacatagggatttgccgatatttttcagagtaattaatactactctgcaaaaggttggtctcttggggctttggttatgaagttcagctttttatccccacaccaactgtcttttctaccttggtactggagagactgtacttacagtaatccctttcagtaaagtacctggttctgagaccagggaaggtgactgtttctctcgtagcatccataggtaaagcatgacagaagttggtgagaacagtgataatcgttgacttactcccaggacattccaggaggactatacatcatctcattttacagtgagcagctaattctctttctagactatcagctaaggatgtaagcccttacaaatactgactcattgtatacccagaataacctcatgagaacagagatgttattattcaggttttgtgggagaacagcacagagacttggcttgaggcaagcacctggctagtaagacgtggaactttaccagttttgttccagtgtagagtgagctgctcagtttaaccttctctgcaggcctacacttttcctgtctgacttcccttttatcctggcacatctgagaatgcatttctaactttctaattcacacagaaaaaggcacacaacaattatatattatcaaaatagcccatctccgggaaatagctatatttgttttataataaaatgaaaacaacttcattgttgttttgggggtataaaaataatatgtgcttgtaaagaggtatggaacaatacataaatgacaaaggaaaaatgatcaggaccagaaacttcattatacaggagcatttgtgtaacaggcttcctggtgtttctcagcgcacacgtgcacatgtgtctaatttttttttgtaggaattcatttgttgtttttaaatctatttccatggctacaatgtaatggggatatatttctgtgacactgggcataagtatacaccatttttaatatatatctttagagaacttttcagttctaatttgcttagaagaggaaaacttgttaaattgtgagttaatttttgtattaaaaaatataatttaaaatcccaactccccaagttaaatacacgagataatgggaaaatcatatatcctctcccctcctttctttctctaattaaaaacccttttatttacttatttttcttttttatcaacacattttcacaccatatattctaataatgccactccaactcttcacagattctccccacctcattagcccaactccatgatatctctctctctctccctctctctcccctctctccctctcccctccctctcaaaagatgaaaagtcaagtaaaacatcaaggtcctttgattatatattgtagttttcaagtgtgtgtgtgtgtgtgtgtgtgtgtgagagagagagagagagagcatgtgagtttctgtgttttcttaatttattttttaagaattatatatataaagattacatttatataattcctttttctcttcaaaatttcctatgccaccctccatgcctcaagttcatggcattatattctttacttattactgttgcacacatacatgcatgcatatatacatacatacatgcatgcatgcatacatacatacattaacacaacctgctgagtccatcatgcatgcataatacatacatacatatatgcatacttgcatacatatattaatacaacttgctgagttcatttaatgttgctcacgtatatgtatatgtatatgtatatgtatgtatatgtatgtatatgtatatgtatatgtatatgtatatgtatatgtatatgtatatgtatttacggcttggcttactgcttggcatgggatgacctatcagaggactcaccccaggagcagactcatgcttccccactccacagttactattactgcctgtagcttttgacctacacatgtgatttcctctgagaggtctctcccgcctacatttccaggtaatcgttatttggtttgcttttgttgtgtgtttaatgtttggtacacagttattttcaagtattatgggttcagacatatcattttgtatacaatttctgtttatatcatgaattgaagagggactggaggtcatgggaggagttggaggaggacagggatggggtggggatgatgtaaatactgtattggtgtatcaaattctcaaaaaggaaaaaaattgaataaataagtaaatgaggtactttagagaaagaaaggaaggtttctatctttgggaccaaccttaacaatgccctctgtatccacatagcagtagcttttttttaatgtggcacagagctggagtgggaagtcatttatatatgtaacaaagttcacaaagaacattgacaaatgctttcctatttagttcaataaataaatttcttggatgaggacaccaggcagaagagactaggtaactcatccgaaatcccacatcttgtgaaattagaatattcgttcagcaatgctgaggccatgctgttagctgtgctcaggcacaagtgcggctgcctggtggaaaaacagagaaaaagaaaggcggagagtaaccccttattgatagaaagattaggaaagaattcttgactgctactacgatccttcttgtagtaatcggattccagttgagtcttttgaaaggaatctcagcggaaaagcagttagatgttaaaagaaaagagcgattggaatgttcaggtattaagaagaatgtggggtatgctttgggcttaagaattaagaggatgatgtccaagtagttaaatgaatttgcgaaaatgggtcaacgaaaaagaacctcaccagaatgcctggtccattttcaggcaggcatattgaacaaattcttttctcatctcatttccagtaaatagtcagagcaagtattaagcgggattttatatgtacaattagaaaggattttatgcttagtattatactggatttgggtgcagataaattcgcagaacactttcagtctttgagtcagccttccctgttaggatagaggggtatatagagaggtttttagcagttatcacatcaataatgaattattagtgcttgtgaggatacagtgatgttttcagaaaagcattgtacttgagagaatgcaacaaaataaaaagatgttcagcttttcatcctctgccaggggtaaatttgaagagggagcagtaggcacggctcctggccttacacagatataaacagaattcaatttcttcaagggaaaaggactgtgtacaacaaggtagcatgtgggagacaagcatattttacttggatggaaaaaaatgaagcattgctattttctaacataccacatttggtattcagacaaattttgaacagtggtgtaagctatgattttcatatttattagtttatatccttatttcattggtatgaacctcaaactctaatttctaacatttctagaagacagtcctcttgactttccacgtgtataacttctgtatgtatctttttggactatctttagcaatcaagtggacaatggcttattgatgtggatcacttggcctctgcagttttccttttcatctgactcccttcctttaccactaaacgaaggcaaactccttcccagcactaagagttcttctggtgagagttctgtctgctgagtcccaacatttatttatctgtgccaacctgctgctgagtggtgcttcattcctctttgattgccaggactatccaagtcctcagatcccattagcgatgtttgctagcctggaggttttcagggcttcatgtggcatcagggcaagcctttctcttccctcaccaatagaaaaacagaaaagatagctcagtggaacaacaaccttggttgttttagtgctctgatgaaatggctccaagactaggggatttccctgaagttaattactcctcacattaggttggttcttcctaataaaatagcacagggaccccaatgtgatgctgatcatttgatgaggtttaaagaatgcatagccagattggaaggctcaagaaatgtcctgtccttttaagtaagctgtgtccttcagtaatatcctgaaatgaaacaattattttaggcatggttgtggttatgaatatgaacatcaaccacagctggcttcatattctgactgagccacttaccatgcaggtgatgttgggatacatactcatttctaaagcgcttttttcatttattatgtggacgttacatatttattataacaggagttagagcaactgttaagtgaggtaagctctatataatgctttcctactatttggtgtcaaatcaagatttgataaaaacttccttacagctttaccaccttctagtagcaccatgagctagggaccaagcctttgatgtatgggttcctaggtaacactcaagatctaaattacagctccactctcaagaataggaaggaatgacctcagaagaatgtacagagtcatgcgatgagttggtggaatttgagaacgtggtatttaaaatgagagaaagagtgcaattcatcttagagaaagttttggtagaactccccatgaagtttgaccagtcacaaagccaactagggatatagattagtattttcctcatatggcttgatcagaacaggggagagccctacctttcagaatgtcatgcctatcaaatgctgttgcctacaataaagcccaatgtgctttttgttttttctcagctcgagatgcaccttgacagatttgggaatgcatgatcttaattaagaaaattcctccctaagtcttgcctgtagataagacttttgtgcattttcttgatattggtgggtctataccagtgaggggtggtgctcctcctggacaagtggtgtagtgttgtctaatgaagcaggtggaataatccctgaggaggaagccaataaacagtacacctccattgcttctgcctcttgcctccaggtatccaccccgacttctttcagtgacgaagtatgaccccagagacagttgtaagatgaaataatcctttcctccccacgttgcttttggtcatggtgttttatcacagtaataggaatcctaacaaagacaccctcccttctaaactaacatattgaggagtaggatattgacttgtgagtttttatggagcacaaatatccatacatatatcaaacatatttattgtataagatatctgcccaagtgatatctgctagataggaagacacttaaatattcctacatacagttccatatttagagatagaatatctaatgtaatggccaggtaactaaatataattttaaaatgttcccgctttttttaaaaaaagaaagaaaatctaacataaagaagagaaaaaggaaacaaagaaaaaatatagtaatcttttatgttcaagctgaaaaaaataacataaatgaaaactgggaaaaacatgacataacctctagactatcatcactctataaaatattattaaattcaggtcaatatctagacttgtatctacaggctggaatgagaatatgaaatattattcttctaaagagaaatagaggcactgggagtgtgtgggctcttattatggcagatatatttttcttctacttgacttatttaatacaggtactgctggaaaattgactattgacttgtgctatttttcttctttacattcatactttattatttgaaaattaaaaccgtcaacaatagtaaatgtcctggtctttctccctcatttctcctgtgtttgttgagcagctatttctcatggagaaaatgaaggcatgcctggcaagaatgtttcttttggatctcatgcgtaatgttcaatgtgggtgtctattgtggtttaagtggtaattgttcctcacaggctcatgtgtgtgattgtggggcttcccagttggtggcagtgttttggggaatgtacttcgggaacatgggaacttgctggctgtggaagagcactagaaggacttgaagggttgcagcacattccatttccagttctgcttttctcttgagcatctaggttatgaggataaggagctttggacacacatcttaccatcatgagctctgccatgccttccctgacaacgtggactgaaaccctgataatgacaaatacagatgtggatgctctcatccaaccattggattgagcatggtgtccccagtggaggagctagggaaaggactgaaggagctaaaggggtttgcaaccccataggaagaacaacaatatgaaccaaccagactcccctagagtttccagtgactaaactaccaaccaaagattacacatggagggacccatggctccagccacatttgtagcagaggatggtcttatctagcatcagtgggaagatgggcccttggtcctgtgaaggtttgatgccccagtgtaggggaatgccagggcagtgaaatgggagtgggagggtgggtgggagagcatcctcatagaagcagggataggggagatgggatagggggtttgcggaagggaaaccgggaagagggataacatttgaaacgtaaataaataaattatccaattaaaaaatgatcccctcttctcttaatgctgttttgatgaattattttgctgtaacaatgaggaaaactacctacctgtacactttctacacttcttgtttgtgttactttgggttatttacttacatttataagctttcacttattgtagatgaaagattaacatctgccttgtaattgtttctgagaactgcaggtgtataccctcagtgtctataggggattagtccctagaactcccttagacacccaaatctgcacatggcctgcctatcaatgtgtccttaaaatcatgtctagattatttatgattaaaaagttgtatcatactatttacagaataatgataagtctgtgagcaatctgacaatcttttagaaagagtgaacatagggtgccatggcctttgagactatgagattgtgtctgccatgttagtagctgaagaagaacaagttgtaggttagtatgactggtggagggcaagggtgaaaagaatgtgtaagcatatgtctgaccaatgatagagaatagccagttgcattggtataacaagagagaatgaatggactgaggcaggcaaactggttatgtgcagtccttgtccttgaacttacattaaggtcacatatacaatcaatacaccacccactaattagtctgtatcttgttatttagtccttggaagaaaaggcaccagggatcacattggtctgtttcatcatcataggaacataactaattaaaattgttttcaccaccaaaggtggccattgttatatccctctcctgctgataccaagatggcatttatatatcttcagggaaatacatacacacacacacacacacacacacacacacacacacacacacacacacacatacacacacacacacacacacacacacacacacacacacacataaataaacatatacatatatgcttttatattcgtataaagaatatttatatctgtgatgggaaacataaggagctttcattgacttccagtggaatatttcaggataactaatccttctggtcacatattatatagcatagtgttccctgcttacctttgttataaagtttatatgatatctttattttctgcatgtttctaattgcctctttgttagaatcttgtttccccaaatccacacattggctgctgtgacatgctgttaaatccttgtgacactctgcctcgatttccttactgtatcttttgcagtttacagaggtttgggcctcctgaaaatgtaaacacatgtaagattacttcagagtgcatcaaccaatgttagagtgactcactgtgactaactcaattgaaatgcttatggaagattactatttttgtagaaggaatatggttaacatctgagagctcattatatatcattagcaattttaattttataataacccttgatggagtccccagttttaagaaaatgcattagtgtatcactcacctaccactgaaaatgcagcccctctcacactgattatccattacaatttctgtggatgtgtttctttttggcactctccatcttaagaacaaagtaggaactaatcacgagttgttctctttttaattttgagattgtaattacaattaattacaacacttctttattccttccctccctctaaaatctttcatctatacatctctccctacttttctttaaattcatggcttcttttttcatcaattgttattgtgtgtgtgcgtgcgtgcatgcgctattaagtccatataatgttacttatccgtgtacgttttcagggctgcacaactacttggtgtgctagggtgctcttccctgcagaagactatctcctcctcacagccttaccccgttgcctgtagttatttgtgtagggctgaggccttctggcctttcccctatgtgatctgccatgtttctcagcatcatccttgttcagctcctgtttaagcagtcatggtcagattttatgggtggggcttctgatgtcactaggagacacaatctcacagcaaagtccctcatcttctagctctcaatatctttctacccctcctctataaagttctctgaggctcaggcgtaagagtcttttgtagatatatccattgggacttgtctctgttgtgatcagaaaaagagaaagagctataagaatatgttctggcagggtgtgggggaagggagcattctggcggacccatgctgaggcatccttttctcctgagggaccagacacacaccagtatagtatagtatagtatagtatagtatagtatagtatagtatagtatagtatggaacagagcttatttagggcatggggaggggagctaagagggtagcagaggcagagaaagtcagagaaggagagaatagagacatagatgtcagccatgaccacatggagagagggggaagggaatggggatagagaggacacaaggggacaagatgcaagagagaggcaagagagccaagagggtaagagagagaggaggggccaagcagccccttttatattgggccaagcctaccttgctgttgccaggtaactgtgggggtggagtttagacacaataccaacagtttccacaactctgaatttttattgcttgtgttttttcaattctttttgagaaattcatacataagttcaatgtttctttgtaaggccctctcctccttgttctccagctctttctgtgtccccatgacaacatctccttccaaattcatgtttgtttctctaattacaaaggcatgtgttctcacacaggaatgtgcacacacgtgtacacatcatgtgcacacatacatacacaagtgtgcatgcatatgtgttcacatatatacacactaacataagctcacaaggaaagaaatcaaagaattttctaattacataccaaaatccaacgtacccttttatattttagtttttccagggtactataattattctaggtggttatataaattgaatttagagagtctctaccaattagacaaaccattgctatattacctaaaaaactggaatcaactgcgaactcctagtctccaaatacagacgtttcatgtttattttagcataaggtctgctgtttatttatgtgactattagtggatcattttacatctaagacccagaggaagggtttgttgttgtctatggcttcatttactttgataaattcgatccctccacttgcctacatatttttactccttacaattttttttaactaaatagtgacttaaaagccatttgcagacattataaaacataatgcagttgttaagggaagaaaaccgcagaggtttcattttgcttttggtgctaatttatattcttagcaggaatttagcctttactggaacgacttgccaatctgtacaacttgaaagaaaattcaccccactaactgtaattatttcagtattaaggatgtgccttagtttccacagttacaaagacatagaacattagtcttatcttttacaatgtagtacttgagcacagagggttacttttctttctatctatctatctatctatctatctatctatctatctatctatctatctatctaacctatagatgcagtagatgtagatgaagatgtagatataagtaacagatattatcaccatataagtgaaagcagagctggcagtctggatcttgaatgaatcctgcagatattctacagcatcaaacacaacaaagatattatttgatttgtagttgttgctatgatgatcttgaaaaattcttgtttgatttgttttgaggtattttgtggtcattttcttgtatgcattttaagatcacctttctagctcattgctaataggagaatttctaattccagtgtgttgatttatgtcctgtcgccttactgaacctagtgctagtattttgctgattccactttggctcctgttaagtgacaatattctcaaatgcttctgctcctctccatcctacactgttttcttctcacatgatcttctttcatttcttggagactctgtagaataggtcagagtagctgtgaaaatgagcatgttttctctttctcaaatgtaaatgacatgtttttttttctctctgtttcctggccactagctgaacagtttactttgcaatgaattccctcctcttccaccagtaaatccatctgagccttaatgcagtgggtgtgtccagtcttggactaaaatctccaaaataaatatttccctttttacactgagtacttcagatatttcactgcagcaacattaaactaagactaagactaagaaagaaatatatgtaagtgtttgcccaaagtacaacaggcacagacctgataggtagagctggggtcgagaaatctacctccagtgaactggagacttctgaccaattgcatataggaaatggaagaaattaagatttttttttgtcctttagtgcatactattttgttattagagtggcaaggagaggcctcatcatgatatttattatcttatgtctatgtgtattttggctgcacatatgcctgtgcaccacagtaatgtcttgcgtctgcagaggctaaaagaaggcagtggatctcctggaaatggaactctaggaatggttttgagcaacactataggtgctgagaatcaaatttgggtcctttgtaagagccacaagtgctcttaattaactattgagctatgtcttcagccccgactgtagtatattctttaaaaatgtggggaactaggtagcccaaactttgtttccatctcacagagagctgcttgcctctgcattagagtactgggactcaagacatgtcacttatgaaggccacagaatcaaagagcaaggagactctaacagactgaatcatcttactcatccagttgaaagtaggtaggagattcttatgggtaagatgtttggtaattcattggaatattgtgttgactctatagtcaaagtaaaaaatctgaaaagaatagcctcaacattctttctcatgtttttagaataatttactttcctagacaaaagtcacatctagaaaaatatttgctcttctttaatatcaacagtaaggtcggggttcctatctgttttacccaggaacattctaactgtttaaactataaggtaagctatttgataaatcttttgctatctttgaaatataaaggctgcagttggaatgtattgtatgactgaagaataaattaaattaaaagaatgtaaaggaaattgtcttagtcaggatttttattcctggacaaaatatcatgaccaagaagcaagttggagagaaaagggtttattcagcttacatttacacattgctgttcatcactgaaagaagtcaggactgaaactcaagcaggtcagggagcaggagctgatgcagaggccatggagggatgttctttactggcttgcttcccctggcttgctcagcctgctctcttatagaacccaagactaccagcccagagatggtcccacctacaagggcctttcccccttaatcactaattgagaaaatgccttacagctggatctcatggaggcatctccccaactgaagctcctttctctgtgataactccagcctgtgtcaagttgacacccaaaaccagccagtacagaaatcatgcaattcatttacagcccaaatattttgcttcatttgaaaaacatctgaaatgaaagatacttgtattcaacaacaaaaaatacacataacaaaaatacatttatttttattttgtaggtgtatagatgacacatgagtgtgtgtgagagagattgagagacagagacagaattagagatatatacagagagaaacaaactgagagacagagagaaacatagtcagaggtagagacatagagtctgtgtgtgagagatacagagacagaaagaccaaaacacacacacacagcgtgtgtctctgtgtgtgtgtgtgtgtgtgttgctgggtttcaaactcaggaccttgcagctgctaggctggtgctgtgtaattagctgtttgcctagcctctcagaggtctttatttttctgtaaggcataggctgttagcagttctactttgtgttaatctgtttgctactctagtcattgatcctgaccttgagaaggcccaaatgggaaggaacatcagaaatgcacctcttctccttgagaagctatttgtgtattcttgttgctcagacttcctgtctaggtgcatgaccctcacattctagaactggaggtgagcccaggggctcacattcctgtgctgcatggccatcttagagctcaggtcccttgctagtttctcagtttagaggttgttatttcctttagtccttgcctgaagttgtcaatgataccatagggtgggagggaataaaaatgcacaataaactagcaaacagcatgaagacaaatcataacagacatttcatttccttctcagataaactgacaggcctcataaaccgggggggggggggggggtaatcgacaagctctatgttgcttgcttttaattactcctgaaacacgcaggatgtgactgggccacactttatgtttccacagagactagaacgttctaagtaaacaagaatttttttagctatgatgcccgactaatctgtctcacttccctgagtccccacatcctacctggaggaaaatgatgacattaggatgaagcaattaaagacagagaccttctgtctagagagacaccgaagaagctggagtttgtaggaagttacagttcaaccacctggaggatgtaagattgtaaaggtacagataataggacgtgaaaatcaatgctgtcttttaaaaaacaatctagggaggaacgagatggcagtgtaaagtgacagaatgtaacaatcaaaaaaattagacacaaggtatttgagaatactttgaggtgggttagatactgagctttttggaaattttaatttatttattttattttatgtgtataaactttttttttcttgaatgtatgtatatgtactgcatatgtgtatgtatatgtactgcatatgtgtatgtatatgtactgcatatgtatctgatgctcagggagctctgaaaaggacatcacactccctggaactgaagttacagagagttgtgagatagcttatgagtagtgggaactgaacacaggtcctcttcaaggacccactgagcattctctttagaccccagagttcatcttaaatccattaaactgtccttacaggtaatgtactagcttataggaaaacaagaatgagatacaatgtcaatgtccccataaaatgagacaaaggataaaaggtcatcttcctataacacaaacaaacaaacaaacaaacaacaaacaacaaatcttaggattggtatgctttagatagtggcaagttaggtggccctttcatgtgagtgatagaccattcacttagtatttgagtttaaatttcaacttgaaaacaaaggagataaactctttgtgttctctttgttcaactaaaggatggttgagttttatgctccccattcaatctttgtttattgtttttaagagaaggtggataattcttatcatcaacagaaactttgaacagtgttgatacaaatgaagaagagcttgtataaaagacttgataaagaggtgctttgagagagaggaacttctttgtttcttttttgctttagctcagttactatctcagactttccatactttatatggtgacgtacagtggcatgaataaatcatatcccaatgagatagattgtaaactcgacgaaatacacacaacacacaagtttgattttactattttctaactgagcatggtgctagacactttgtagattctcaataaagagaacaaatgagaagttgctctcaatgaaggggccagtgaatgaacaaatgaatgaatgaatggacacatttttttttttgatacagaatgatttaaaacaacaacaactcaacaaccaacaatctcttgaggctgaggaaagccatagtcattgcctattgaaagggtttctggtgaggatgggcgatgtcccaaacatgggagagggtgttggaaagagacagatgggtgatggatgtgagtgggcctggtcccagcctcagccttagtctagttttgataactgttcccaggtatttttctcttttatcacacttttaaaagcctatttaaaagcacactggagattccttttgatatagaaagtcaaagtgatcaaagcgtccaggagtagacattgttctttcactctggaaggcaggctcatcattactcttacttcctttgcattggcagttgcttcctctagtgggaagctgggattcactcactgaagataagagagatgccagggattgtcacaacaattgaacacaattggcagtaacttccaacctttggaagttcaagatgctttctcccttcctgtcttccttcctgtcttccttcctgtcttccttcctgtctttcttcctgtcttccttccttccttccttccttccttacttacttgatgctgacagtcacagcgaactgataaaaaaaatcatctagaagtatcagggactgtgtcaggggttctgtgatcagtgagttactttactgtgacaaagaaacggggctgcatctttcatgtggcccgaggaaattgccagaaacaaaatgatcggccacagaggagcagatgactgactctgcttttgaagtcgtcaatgtcatgaaggatgagtactgatgtcatggtagctacaatacaaaaatgattatatcatatgtaattaatgcctttataccacagaccaaattggtatatttttcagaaaatattgattatcagagatcatttcttaagtaaaaaagtatcatacctaaaagagtttnnnnnnnnnnnnnnnnnnnnctccctctccctctccctctccctctccctctccctctctctctctctctctctctctctctctctctctctctctctctctcactttctgtttttattttcattggttattttatttatttacattacaaatgttatcccccttcccagtttcctccccacaaaggccttttctcctcctgcctccacccagcctctatgaaggtgctcccccacctgtccacccacccctgcctcagtgccctagcgttcccctttcctgattaatcaagcctccacaggacctaggggctcccctcccagtgatgcttcttaattgtcccacccttcttcaacccttctcagtgaaggagaagggaataaaggagatttcatcaagggagagaaataagatgaatccaaatgttttccatgttctatggagtgaagtggaggatgtaaaaccgtattcgttctaaaggatccaatgaactgaggcgattaggagacagcccagaaagggaagtagagatagagactacttgtgcagaccacgttatgaagaaggtggtatttttcttagcttagtacaggaaaaatgccatctaaacttggagcaactgtgttgctgacttttcaaggatacctttagttaatcaatggtgagctcaattttgagtttggcaaatagaaagactttctttgtcctctatgacattagtcctgtttgcattaaagtttctttgtatctcatacacagagagcttgaacatgctagctgggtattagaatgggttctagggtttagggaagttgggtatcatcgtgctttagactcacaccctccatttggcttgtgatagggaaaatgacttgaggtgtacatcacagctgaaaactctgttatatagaactccagtgttgggagtatctttagtagccatttagccctcagtaaatcattttggaaaaatataaaatttctttaaaaatactgtttgtaactttgatgacatgctccttctatgatatatataatatatatatatatattatatatataattgaacttctatgaatatttacacacacacacatatatatacatatatatacatacacacacacacacacacacacacacacatatatatatatatatatatatatatatatatatatatatatatatatatgaatgattgggaatgaggggcaggtaacacatatgcttccccatatgaggggcaggtgtagttatgaagaagccattgggttttgggggaatcaggtagagcatatgctgtgattcctctgtgtatgaaagtgtcccagtaggatgagaaaaattaaaatgtctcattaactagaccgattctacatttcatctgcttgtacttctgtcaaaatagtgcacaagcatttcaaaacagctcaattctatgtgggggctccacgcttgtagactctgacagattaatgctactgaatgaaaacatttatagtaatgaaaagagaaaggaagggtaattttaatcctaacatataaaggagtcagtgaggctgaatttattgtatgcccacatgggaacacgtttttgaattgctttcactcttaataaaaattatgacttcagtgtggactacagttgtgacaaattcgtcaggaacagtgtggaaatacttttaaaaaggtttgtttactttattctgtgtgtatgtatgcttgccttcaagatgtatgtgcaccatatgtatgcctggtgcccacagagcccagaaaagggcatcagaccctctggaactggagttagacaaagactatgagcaactgtgtaagtagttgttgggtagcaatccttggtccttggcaagagtaaccagtccctttaaccactaagtagctccccagatttagaatactttttttttataaaatactaaaatttctgtaatatcaataaaccacagtctttaattgtatcctctgtttcagttcttgtgaaactcttttaggtatgatacttttttacttaagaaatgatctctgataatcaatattttctgaaaaatataccaatttggtctgtggtataaaggcattaattacatatgatataatcatttttgtattgtagctaccatgacatcagtactcatccttcatgacattgacgacttcaaaagcagagtcagtcatctgctcctctgtggccgatcattttgtttctggcaatttcctcgggccacatgaaagatgcagccccgtttctttgtcacagtaaagtaactcactgatcacagaacccctgacacagtccctgatacttctagatgattttttttatcagttcgctgtgactgtcagcatcctgtatatggttacataatggcagaaggcaagtataggttgaatagccaacactgttcttgaatctggggttcaaaggcattgagtaaattaaatggggatgtgaaattcttcctgtgtttgctttagctgtctgcttttctagttcttgtcttttccttcagtccagtaaggcaaatgatgtgctgggttgtacctctctttcctagaattgaggaattctatgcctcctatgaacatttgtttgttttaccctaagatttgttggcaaaattgacactgagaatggattggcatatggcatgatatgatatgatgtgtgtgtctctgtgtgtgtgcagtgtttttatatttctgaaaataatttaatgttccttgagataattttaatatgtctatgaataatttgatatttttatatttcttgcaacatgtataaatgttgctagcaatgctggaagttgaaggtctgatttgtaggcaaaggtttgttttgtctgttgtaagtactagttttatttagtttcacatttaactgcatatcagtttctttgaccattaacttttttttccttttttcttagatattttctttatttacatttcaaatgttatcccctttcctagtttcccctccaaaaatcccctatcttctcctccctccctttgcttcccaacctatccactttcacttcctggaccaggcattcccctatactgcccctatactggggcatagaaccttcacaggaccaagggcctctcctcccattgatgaccaactaggccatcctttgctatatatgaagagagggccatgtgtgttttctttgattggtggtttagtcccagggagctctggggttactggttagttcatattgttgttcctcctaggggcctgaaaactccttcagctccttgggtattttctctagctccttcactggggaccttgtgctctgtctaatcgacgactgtgagtatccactactgtattagtcaggcactggcagagcctctcaggagacagctatatcaggctcctgtcagcaagctcttgtttggtatctgcagtagtgtctggttatttataggatagattactatgtggggcagtttctggatggtcattccttcagtctctgctcctaactttgtctctgtaactccttccatgggtattttgttcccccttctaagaaggattgaagtatccacactttggtcttccttcatcttgagtttcatgtgttttactgtatcgctgataagcagtgcatactttaaatataataaactagcccatgtatatatttaaatttactttgtcaacctttgctttttaaaccaaagattttaatccatttatagtagttttccttcccaatatttagatccatatctgtgatcttattttgtgccttcagtgtctaagtttttaagacttcttctttttcagtagtcttcttttctgtattccccttatgctatatgaagttaaatctccatgaatattcctgtcatggtttttctagataccctagtggctaagcttaacagagtctcttgttcatgactatctctattttctcccagggtagcataggaagtttaaaataagatccattcactcccctctgaaatttcatgctgttttcttcattctatttagatttttacctccataaattaggtatcatagtgagcgaaatacaatcaccatgacaactcatccttcacttttgaaaatataatcttggaatttgactctttatgatctataaattatatttatattttcactgtgtgtctctaatgtattcatagatatcttaaaccaagtgtctggtgttgtttattcttcattaatctataattccaggacagtgacatgtcctgagcaggtgcttaataaatacattctgactcattgatttcacatccgattatgctcataagttttcattaaatgagaaaatttagcctccaaatggaaacatttggaggttcttctgctgtggttagcactgatttgtcgtgcctcactggtgtgatactgactcagtggaaactttaattactaagccagtttggcactggaagcagtgggtgaaaagactgataaataaacaatgaggaataaagaaatagtatttttttttgtgcctttgggaatgcagtaagcataatctgcttccaatttttatttgctacttgtccacctaactataccttttagttcttatcatagtcacactttgtagaggaagctctgatacattgtatttctttgccttctgttctatcctataagatcattgtagacctaagattctccacaccctctttctatttatctatcctgttctttctcactatccccgcatctttcaaatgaaaagatgcttcttcttttgttatgcattgaacattcttgctaaattttagtcttgtagtttccctttggtttatctagaaaaaaatgtttcccactcatagaaacttttttcttccctaaccatatctgatagaaaaaatagcttagaaaccaactgaattaacttagaataatgatggagggacccgatattagacttttcttaacttatattgcctgtggtcaaaggttaataggaattacttctacttattttcaagttatttgcttaaaatgttctttagccacatccaagtttattttgatgcaattaaagaaagtaaaagcggaaccattgtattaatagaacagagggattgttatcataaagaacaaacaggtgacaaattggaccaccttttctgctcccttgcagtgaccatttgttaccgtggtcaaattttgaagagaagtgtgctcttctaacctttcagtatctgtttttttagatgtgaggtaaggtgctgagtgagtagagaccttgcctatagatgacattatttacacatattcaaccttcagtcatttataaacttttcattgcaattcttaatgtagttgctggaaccaaaaaagttcactagagtgcttcctagaccccatagagactttaatttgggaaagtgttaaaatgattatgagcagaatgactgcataaacaacaacaacaacaacaacaataacacaagaattcacttgagtagtaatttgtggtgcatgctctgtcaatcgatggacaatgtagctgctccaagtataaaagagatctctggagacctccttctagagctttgaaagacttggagcatagtaggaggatccccagtggagaatgactgcttaggatgtgcaaggccctagattcaatccccagcagcctgtgtttcacacacacacacacacacacacacacacacacacacacacacacacaccacagacttctactaaatattgaaaatatatatactttttctttaaggacattttctaggtaatgggcacatggatatatgttttctcctaatttctagtgttcattggcaatgtattaccccaaagaattttcagatgcagagtagagcttatgtagatgcagggctgatgcagagctatagcaaactggggctcactgagagtttggattggcaaggaggatttgcttgaagctccccacaatttttcttctagactaaaagattactataaggaagagcaaggttcttggaactgtttctacaggctcattccagacttacttgtggcccattgaagacacagtggagagttccaacatttttacttcctggagtgtttaaagtattattatcagttttttttttctgtttatgacttgtccctcagtgttacctttcctcttacaaggatacatttaaaatatgtgtaagtctagtgagaattgcaacagagttcatagaagggagcatttaaaacagatgtcccatgcatgagaagtcgtcgcttagtaatgttggtgaccctttacaagatgtcttctttgagtttgtttgtttgtttggtcttagaaaatgtacatctctgctgtttttactgtttttttccctctaattatatcattagttagctttcttgttgctcatagcattatggtgatgggaacacatggttcgggtttttttttttttttttttttttttttttatacatcatgggcagggaaagagggaaggagagagagagggagagagacagagagagagagagagagagagacagacagacagacagacaacagagacagacagacagacagagacagagagagcatgaacattcagggaaggagaagagaagagagaaataaagaacacagaattacttctgccatctaggtccaacctcctagacattttcaaaaactcccaaattgtatcatctgaaaagcagcagcctcgcagtgtattcaccttttctggaaacattttagacccaaatcactatatttctactagtaagatgacctactaacttgatatacatgatgcatttcaactctttgctccatttttattaaagaagtggtttactttattacagtgatgaggctgaaggagatttttttttgaagtagaaattagatgtagtgtgtgtgtgtgtgtgtgtgtgtgtgtgtgtgtgtgtgtgcacgtgcgtgcacacatatcatgcaatgattcagttatggaggtcagacaacttacagtaattagtcatctccttctactatgtaggtcttgtggatcaaactcagggtgtctctcttagtggcatgtacctttagcccctgaactattcctcaatcactgactgagttggttttgactaataggtttctaggtctgtattactatcttaagggttaaaatttctggccatagggctattacaatctttctataatttcctaggagactgaataaagtacgaccaaggaatatttaataaaatttagagcactttaacattttaaaaatagaaaaaaatttcccttctcacatactcaaagctttaaggcttatttagaactaattgagcatattggaattatgtgttatttataattttattagccgagtctgaaaaccaaagaaagggtaagtgtcaagttcctttccattattagactgtgttatgaatttaaggtcttttgctctattttggagttatcattagaggagattatagggctggctatctacagattcccagctgtgggagagagagccatgcattcatttagagctctaaaaattaaattaagaggagttatctttcgaaacatccaaaaaagtttattgagcttggtgagtttaatttcagtgcatttaatgagagtcaaaggtggattcatttagtgaaggctgttggatgggagcagctatttcatgcagagaaaggaagagtggagaatatcttacaattaacattttgcttctaatatatcagctatacaaaggctattgagagtttgttgaatgttaacacaatgtaaatcattggcagctaacctcaacttccatgtgttgaaaactcagtttaattctgcttttacaaatacagcatcatcttctggaataagaaagttgtattaattcagtggagatatttctaaatatgcagtctcaacgtgaaggggctggggacacacacacacacacatacacacacacacacagacgattatcactcagtcataaaaaagaatgactcttttttttccatttgaattaaatggatggaactggatattatcaccataagcaaaagcaatcaggacatagaaagctgtatgttgcatgcaacttttcttatatctggaaattgaaaaaaaacacataagcaaaaatatgatctgaaagtagagggagtgttgttatggaaggagaagtgcatcaggaggggaggaagagagagaagatagggcaggaagggtgaacaaggagggtagaattaattaaaacactatatatgcacatgcaaaaaagatcatgactcatttgcacacataattaatatgagtaacatcttatggtaataacaaaagagaaccagagaggcaaacaccagggcacagatagcatcagagactccacccccatccccatcagatgctctgtgcagtggatgctctccagatgtctgtgcagcctcccctctaattcttagtagcttcgcctatctcacctatcgctgtctctcactttgctggctgacacttgacctgccattcctagcgttctgctatcctgtccctgagtttctatagggtactctcttggttttcttttgggctcccatgtgatgctctgcttcattaagggagcgtttccacttgtcttgttcagcgtggtgctcttgttgcctggaacagtgctggaagctggcacactcctcattaacagatgttgaacagagcatgtttctatcaattcacttccttctagcactcgcttttgaattaccgtgggtttctaatttgtgtcacctagaagcaggtaccaaacctgcaaaccaagtcccctttttataacagctcatgatgtccactgctgatgctaatgttttctggtgtttcatctactaggacctattagaactggtgcttttgtataaatattctgtaagttactttggcttcttccaaaggaggtgttttctgtgacacctgggttctgttttggtaagaagagatatttctattatgttctaattggattgaggtcctgagtgttttctgaggggcacagacgaaaacggattctgccgattactaacagacattcgtcaatcttaggaagtctaacaacaataacgacgttattttatgggtcaagatatacacacaccctggcttttaaatatcctattccaccatttctcctatgacaaatataatacagttctctgaggggaaccttaaaattctgtaaagatgtctcttatagaaatgtgtgcatgtatgtgtgtgtgtgtatgccctgatttaatgcaagtgcgccacacacacacacacacacacacacacacacacacacacacatacacacacacacacacacacacacacacacacacaattacttttaaatttaataccacagaaagctaaaaatacaggtcatagcatgaaaggaactaaaaaacaaccaccttcccatgcctgtccacctgtaagttgggtggttagagtttcagagaacgtgtctgagacgcaaacatgaactcttttctcatcaagaatgacagagcaaggctaggctttattttaaatctacagtctcaaagatagtaggtgcatgattcacttgtataaatttctttttcctgttcgcttgccccacaatctcctgcatcataagacctattttagtgtgtacagaagtttctatctttgcagttttaactgctagaattagaggacaaattaaaatttagtctttctctccaaagaggacggctacagaacacaaaagcaaataaatcagtccaggcacaaagggacgcttcacgatcctcagagtcttgtttgaaaagtaacaggctatactatttatttattcattcatttatttaactatttatttatttatttaactattcattcattcattcattcattcattcattcattcatgtgtacttgtaatgagtttacttatttgtcaatgaggtttgagtgtgccttcatgtatgtatgacaaagtgaagactttgggtgtcttgatccattgctctctaccttagttttgacagaaggtctctcactgagcctggacagcattgattcggctaggctggaaggccaattgaggtttcagatatgcaatcactttgcctagcttctgcagacatgctggggatccaaatgcaaggagctcgtgcccgtgtaaggggtatttcagcagtggagccatcttcctgttctttgtccatacagttgtatcatgcgttgtataatgctcagtgttattttacatgatgcttcagcttttgattgtagttatgtgtgtgtgtgtatgtgtagtgtatacccaaataaattttgtagcattgataaaaatgaggtttttttcaaaaaatacttttaagttcaccacataggcttcaaacactgactttttattgcatgagccataaaacttctggccttaagtcccaggcagtctttaagttttgttatagtttttggccatactacaatatgtaatgaatacaattctcctccccctttaataaagtctaatgaaaagtgtacaaattgggtaatagatttctggattctccacaaagagtagatgcttaaatgaaattgattaaaggtgtattttatcaaatgtaagtgatgataatagtaagaaaaaacacctcatttcagtaagatatcatgatcacattaggagcaaggggctaatataccattttcccctttaaatgccatttcttcccttttcagagatacaaaattagataaatcaaatctgagattctgtttgatattttattttgtgtagaaatattgtacactcctgaaaattccagcatcccttatcatcagtattgcttccaatttacatatctaaattactgctactcgccttcagcatctgctgctatcttccttgttctagtcttagttccttacttgttataatttttattttgttttctcctcctgtttttagatacagaaatgttgtagtgcttcacacatttccaaagtgttccatgtactcaaaactatcctgtgctatccttgagtcttcagtaggaagcgcacatccagctatgtggacagaagccatgtttcctcataaatgcaggattgatgaaatcattttgcagccaaagagctcaggaacaattcctttcaagcttcaaatcaattttgacagcatgaagaattttatgtagcaaatgaaaaatattcatttgaaattttcaaccactatcagtctttgcctacttccacatacactcacaccaagctccggagcgcctcctgaacaccacaagaggtcctgctgggccaaagcatcatgtggactgtccttaacaggagccggtggctggttgagttcttgagagcatctacccagagaattctgaactcttctagctttgagtgtagacaacatgattcaatataaaaatcagagcacacattcattttccctaaggtattggatttgttgttcaagacacatcatgcctggttgctatatcttgggttgataggatccagaggaacccatgcatgtaattagagatgttttggtacatctgaactaacattgtagtttgaagacgcccatagtagtgtaatctctctctctctctctctctctctctctctctctctctctctctctctctctctctttctctctctctctctctctctccatgtctgtgtctgtgtctgtgtctgtgtgtatactcatgctatgtgtgttttctctctgcaggtgtgacattctcagggagagaagtgttcagagtgagcaaacatgactaatgactgtgagatgtttgtttgcaaacaggcaagagtcagctgtgcagcatccgtagcaaatgtttgcattagggaagtgctgttgagtttggactccaaaggctttccttatagatccaggcctttctttcaacacactttctttagaatttcaacattttatccatgataaattaacatggtaccaacatttttgtgtctgtttatttacttgactacgtgataataaattctgactaaaactaatgcatacgtaggtgacaggcttcatcactcaggcaggacatgccttttcttatagtttttacatttattaatttagtgtgtgtgtgtgtgtgtgtgtgtgtgtgtgtgtgtgtgtgtgtgtgtatacattcacatgcatatgccaatcagcgactacatgggatcaaaggttggacccaggtcatcaggcttggtagcaagtgcctaaactcactgagaattttgttgagcatacttctctccttatttcaagtacttaagtatttatctcctcattctctctgctggaggctgattatgtgaaggcaaaagcattccaagtctccttgttgttcattcattctgtctgacatagtgtctcacaggtattttgaaaatatgtataataaatagatacacattttcactgtttcctcagcatattttaaatagttaaaagttttaagatgtgacatgtagcataattttccattatccaattcttaccttacataatcatgtaaaaacacttgctaaatgagtatttaaactaagccctttaataattatatgtgagtctgagtaacagtgaaataatattagttattatgaacttagaataatttccacagaaagagcagagcaatgggtttagttactgtagttatcccaaaggagttaagaacctcgatgccttgaaggacaaaggacaaaggacaaagttaattcagatctggaaaatgacatttgttttttgttttattttgttttgttttgtttgtttctgattctgttgccatattatatagttttcctttttgtctgtggttgcttgattatatttttaagcatttcaagactcttttccttgcacattgaaatcaaacatgcaactacaataatcactgtagtagttaaactccctctgaggacctgatacatgtgtctattgaagcagaatttttgtttttagagccctgagctcaagattcctggggcttctttgtgagttcccttgtgtaaagctgctcctaaatcacagggtagtcgctcacgcttcccagtgctttccctagaaggctcttaagttatggttggattcggctttaagtgttatccttttgggttacagaattcctgtgaacattttctgtaatttgtatatttagttactcaaacttatgttttcatatcttcactatcagtaattttcacttgactgactgtaagtggactcctggtcttcatgtttgtcttttaccctttgacaaccagacagcccatgcatttgtaagcatctgttatccatgtacaccttgaggctgtgaaaatggccaactggagtgctacttttcagtttttatgattatatactttcataggctgtctcaatttcatttttcatttcatgtgctggttacaaatacagtgtcaacaacactgtattgccaacatcccagtctagaatttagatattcttgacttatatcccatgagcagtagtagctttgtcattaaattaaccctggagagtcaccttaattaattaaaatcatactatgcagagaaaagacttctgtctttcatagaaaatcctgcatttctagggataagtaatagactcattcatttgctagttttccagttcagaaagttgtcccgattgggtcctgcagtgaaatggaggtgcgagaaagacactgagaaagcagaaggcaagcatctgctgtttgtcccctggattgatgagttcagctccagcggaagactgggtactaattaactcattaaacagctcccgctgtgatgcctcaatgtaattttgggttggactgatgtttagagacttaaattctcatcgtagaaacttgcctttgtaaaccactcatggaatgcttagagatatcagaaaaatatcatttgctcatacaatagtaaggaagtgctaccatcctggagtctcttagtatgtagaatagtataagcaccccccctttttttgcttagctgtctaaatgctaatttagttaataaatatgaattaaagtggcatgttttattggtagtacaaacctcagttgactgtgagtttgtatctgtgcccagttctgaagaatttcactgctcagttacaattcacccaggaaacatagccagcatgtattctaatggcaaggctgatgtactaatgcactgttataaaaggaatgaaaactgtcctgaagtgatttattttgtgaattacaatgggttctccagggtacacatcacactctgctttcgaaccatggatacaggagccccagtgtgcagtctactatgcagacttccgcattgtcacagttgagcacctaagtgtcacattaagcacaagtttggttaccatgtatgtggcacattgcttgtgacatttggctgatgttcaattggctatgcatgtgtcacggagcatagctattcagcatgcagctcaatcctggtttggttgcccactatttataccgtcagagagaactcctttcctgagggagatcagtggtcttcatttgatggccaagaggatggtatcaaaaggttcttagtggattctagaagatttcttaaacatgatcatgtgtttaacaccagccttctctgtgtgtggattgtccttatgggtatgtgtgtatatgtgcatgactagaggtcagaggtcagcattggtgtctttctcagtcaattactatccaccttaagttttgagatatggtctctatcagtaaaaatggagctcagccattgggtagactggctgcccagcaagtcccagttttattttcctgtccgtgctccttcggtcctggtattctgggtgaggtctttccttacccgactttcacatgggtgttatgtgtctaacctccggttctcatgtttgtgcggtaaatacttcactgatggctgtgtcaccagctcagctcctaaagtcttgtaagggtgctagagatatagtggactgttaatgtaattgaaacagataatgcatgcacttgatccagagggaaagttttgaaaataatctgagataagtagtagtatcttccatgaaaatctttaagttgtaagcatttagtttcctctaattatatattcatattatttatattacagattatatatatattattctttgaaaatttcataacgtgtacaacttttcttgatcacatccatccatcactctcttcccaccaacttcccccaggacccaccctcatttctttttctcaacttcatgtcttccttttataatttttattacttttaatttttttcacccattgggtccagctaaactgtacgtgaacatgggattatctaccatgttcacataccttccaatggaatacaattctaaagagaagtcagtctccaccctagcagccatcagctgctatcagcttctcaactagggatgggatctcaagaacccctcccaactcaaccctgggatttttaactggcttgttcttgctcaggtctggtgtaggaaaccactgatattttatcattttaatatagattaacctctcagagcctaaacatcataatggagtactactagctaccttcagtacaaatctcgctaaagaaatatggtctattctgtaaactgaattaccctttccacctaagcattttattgagggcttaaaggtgtttctgtactatgccaacacaaacaactgaaaaatgacaaacggatcaggtcaactcatataaaaatatcacagtgttgctcttctgtgtcaaggaaaggtttagtcatagagcgccttcgtcagcctcccagtacagtgcagcctactcaggccatgcttattttccaccttctaagaaaggaccatgtttctgaagtatttttaaatgatcagacattgcaataaatattttattggatattttatttatttacattttaaatgttatctcctttccagatttcctctcgggaaaccccctatcccaccctccctcccactgcttctatgcgactgttaattattcaacaattgataaaaaaggtagagtgtgccacgagaagcctgctactaggatggatttctcaccgttcacttttctgctctcctctgacccactttctgaaattaatactcctcttatttaaggaatattgacacacccttattttactatcatcctaaacatttttatgtagtttttcatcacatagaaagacatgtttttgtgagcctttcttcaggctgtcgggtgccacactattctaaggaacatgcacacacattgagatcagatctcctcagagcctaccaactttgggaaatcaggttctgtttttctatttttgaaattttttttttttttttacatggatggcaggttttcttttttgataaattcttacatttttctttggaaaaattttttttcattcagtcttagacattagtatggaataaagacagaattgtatgcttgtgtgtttgtaaaggaggcaggatttataactctgtcacttaaatgttccactaaacacctgttttcaaatttcatagtcaattctgaagacaatataattacatatagaattgaaaactctccagcaccattcactctgagcccgagtaagaatatgaaaaaagcttttgttgttcactgtctttcttatgtagtcaccatccaaaacattactaaatttcaatagataaatagattcctacttcaaaaatagtaatgtagttaggcaatgttgctgtacttttaataaaaaagtaaaaatacatatttattaagatttccctacgtaagcttttcactaatcttttactaagatttcactaagggaaataatcttgaattcaaatgtctttatgtagcaaaaggtaggcctatcttggttctataaatttaaacataaacacacggggtatattatgatttaaaagctcacagggcattggcgtttgcattgagccaaattacgaacaatatattttctttacccataagtttgtttttttattttgaatttcttctgttttttgctgtgagatgagaataagggttggttccatttcctatggaaaccctgttgtcctggggactgctaggtttgctccatttaactaccttcagatcatctgacacacaagtttggctccattcctgccttctattggattcacttatctgtctaagttatccctggcaatgtcatcctttattgtctaggctttacaaatatttaaatttccctttaaatacttcatggtacttggtttttaagtgtctttgttttctaatttgtcattttaattactttttttgtgttataaaaataaagtcagggaccagcaagatgagtcagtgggtaaaagcccttaccacctgtaaaagtatcttttattcacctgatgtaattgttggcttggaggatcactgtgaataagctcaccctttccagtcctttctaaactctggctggctggttcaactcagctgttctggctcaaactcctctccaaggtaattcaatctgaattctctcagcttcctactgaattgcttcaaattaactctgacaatgtgttctaatcttctggttccttcttactctctggctccaactgcctctgctgaccctcactgaactacatgacctcatgaacaaactccactcccctgcactgcactcactgcactgatccccaactcactgacagaactgactgaattctccctgtactgctcttaaaaagcatttctcctgggtgtatcctatctctgactcatcctgtcaaatctgaaatcattcgtcactttgtctgtccttcaattagataccatggtttgggattaaaggtgcttactgaggctgtgctgcattccagccaggtcacatattcttggaaggtctctggatgtgttcagagcagccaggtggctggattaaaagtcctctacaaccaccacacctcatatcgtaagttgaaccctgggaacccacttggtagaaaggaactgactcctgaaaattgttctctgatctccatctacacagggtgctgaatgtgtatgccctgccccaccctcacaataaataaacaagtaaaacaatcaattaaaaaagaaatcaaactagacctttgttttttctctttgtgtcttacaatgtgactaaatgcatattcactcttaggacttttggtgaatctctgaataatgtgtctttgtacagtcatgctatttacatgtagacactatttcccactttcaattagtatggttgctatagtttccttaaatacttcactataaaatatattgtcatctacaggttttaatagaccacctctaccatcattaagttatttctacccatttctagtcttttctttttttctctttctctttctctctctctctctctctctctctctctctctctctctctcnnnnnnnnnnnnnnnnnnnnnnnnnnnnnnnnnnnnnnnnnnnnnnnnnnnnnnnnnnnnnnnnnnnnnnnnnnnnnnnnnnnnnnnnnnnnnnnnnnnnnnnnnnnnnnnnnnnnnnnnnnnnnnnnnctccctccctccctccctccctccctctctctctctttctttctctctctctttctttctttctttctttctttctttctacattaagactgggtagtatatgtatatcaaggatagattactgtcctaacatgtagcatgggtgagtcttaggttcaagcagagagatggggagcccttttttgaatgttttgtatatattattttatatttatatttataatgtctttaattttctctctaaactaaatgaacattatgttattattttggggtgagggtatttgaaagtggaaacttgacaagactaaataactgtgtgctttcttagagttggatatggattcaactggttcatatctctcatattcttattctcaatggctgcttaaaagacacacatttatgtgcaaggtactagcagatggctattagaagagcttctttttgagtgaatgtatattatatgttcatcaatatataatactgtttatatttgcatcacacatttctagaagcaaatatgtaaaatctctgtcaaaacctgtatttctttataaatgtaagtgcaggaagctaactttaacctgggccccgttcttctttgagtgaatttgtttgttttaaataaaatttatttttctcatcatgtcaaccctcctagtggatcagaagacactgcacagccctcctaaatgctaccatgcaaacccaagctcctggctagaagcagaaaagctgggctctgagtatctgtgaggctatgggcatcagctgacctgtacagaccttacttagcgtctatcagcagaagactggtgacagtcagtcaggtgctgcaaagatcctgagagggttgtcctgtttgagctatgtctgcatgctggctgtgtgtgtgttttgctctaattattattattattattattattattattattattattatcatcatcttggagataaacattgagagggatgtttgagcactgactcgaaacagacaagaaattttattatattattctacaccaaatctttttggaaagcgaacaagtgagtgacatctatgcttccccattgagtaatcatctttctgaaacgtgatgagctaagtgtttctacagctcacagttactgaagtctggtgggcatggtacactaatacatgcttgggttagatttgcatattgttttcatcttcagatacatcatgcaagtttgtttgcctaatgaccaaagcaaccactataaacatgacaaaagctattactttcccttaacaagagacacattccaggccaataaacagtaacagtatgaacagctgccttccacgtgtactcgacactttaaattgccattatttcttatactagtgcaagactaacgtgcctagttataaactcacattttctcactcccttccaactcttctcttcatatcaattcccatgttatttctacatcctctgatagtttggtatgcttgccagtatctctgtcagtgactagagtgtaaattcttggaactttataataagtaacataatacattcttatttattcattgatccttagtcaacatgcataccttcaaatatttgcattatgtaattctattgcttgcatttgtcagagccatctacaaaggaagagttgaattactcatgagggaattgtcattttgattgttgctatgtaatataacgaagcagctcaaaacaagggcagcaggcataaaatgagaccccttgtttacctctgcattaactatggttaggatggcatctgatacaaagaagcgatttcctgtagtgtttgagttaatgaatgattatggcatgaaactgtaaaagaaaaaaaaatgtcttcccataagttaatagacttacagaaaaatgcaaagtctcttctggaagaaaaaagattccttcttcacaagggaggaggagatggggtggatattgtagggataaggaacttgatgggctccaagcactggatgagcagatctgagagatgcttgaataggaagtgcctagggttcagactgtgattcctgtgaacttgcttgtctggttttgataaagctctccctgacttacatagacagagttgctgcccccaaccaaacaactgtgcagcttctaagactaccttgcagccatggaagtatctatgactttcctcagcctttacttctttgtctttgctcacattcaacagagaagcaggattctgttcacttcagtttgtcatttcccaagacccttaacatagctaataggtgacacagtcagatctaaacctcaacctttcaactcatgtctacttttaagacaaacctttcaatgaaacggtgagaactcgcagtgtgttacacaaggaaagactaattgcttcacctggatggaggctttaagctgtgacttgactgttgtgactttgtgtgactcatctgtcatttcatgaaagccacactgaacaactttagaaaatacttaaaaattgcctcactggataccattcttgctcaagtttggtgagagatcctctctccagtaagttcttacagcacaatgtaacaattttgattatgaacaaattatctttttggctattactggatatagtgtcactcattatttaataaaaaacattctccttcctttagcttaattttagatatgagagctataaaagtagacttttgagtagaataaaattaaatgttttaaattgaaaacataaaacgaacatctctaacatccaaatttaaaactttttaagtgccaacatgattttccaagaggaaaatttcacatctaacagcatacaacaggctgcagccaaaacagccatacacagctgaggaaagctgacagaaggagaggttgttctccccagggaagtgcacaccaactggttctctagtaccaaacagtcatccctgagaacatacatacatacatactatggattcaacagggtatattaggcaaatatgtgtatacctatgttcatatatgcatggaacaataattattggaaaaagaggccatgaatttgaaagagagcaaggagggtatggtggaagagtttggaggaaagagagggaaggaagaaatgttgtatttaacttaccatctcaaaagaaaaaaataaaccattccaaacaaaagaaaaaactgcaaatggttttaaaaacaaaaccaatcaaacactccaccatcaccaacataaaaatacaacaacaacaataacaacaacaacgtcaacaacatcaaacaaacaaccccaggccctctaagaatacttgaataaagttattttcaggctgtgtgtaagatgcctatggaatgaatgaattttattttcagacttgggtcttatagaatacatatatacataaaaatttcagatttggaaaagtatgaaatcaaatatttcagatgataggcactccagcttgcttatttttaggggtataactcctcatgtgtcccatctcattctattggcatgtatctactctagaggtatgtttccaatcaaacgattcattagagcatactttcaaatggcaaaggcttaattccttggagggactgacatccgtttgggggcaagttcttcacgtacatttgatctatggagtcaagtcaataaaacacccccttctctgggaaatgcctgagaacgtttgctgaaacattcctctatagaaagtgccaaagaaatctatgaaggctaatattttggtaacatgttctaagcaaatgtctgttttacttaaccaaaatggcaactatgttgaaagcagtatagaaaaagaaatacagcagaatcatggatttcagttgaaagaagtccatattttgtagcaactatgatatcaagcacatgtagccatggacaaaaaaaatcccataatgttaggtttgcacctccacttattaatcctttcctgtttggcccattgcttttgaaccctgacatattgacttgatctgattagatgtcctccacatggcacacatagcatcaaagatggagggtgagagttgagagaggggatgttccactgggcatgtggtggaggtcttgggaggaatgtggagacttgaatgaatttcaattgaaatataagacagagtaatgcaaaaacatcactgtagaaagtacattgttggcctagaggcccaagatccacaaactcagctatcatccattcatctatcagtccatccgtctgtctatctatccatccatctgtccatccatctatccatcatctattcatccatccatccatccatccatccatccacccacccacccacccacccctccatccatccatctatctatctgtccatccatccatccatccatccatccatccatccatccatctactgttgtgggagctaatgtctgaaaatgttatattaagtctaacagatatcacatctcacaggctttcattctggagagggaatctggttttatagacaacaaacagatgcacagtacaatgtcaagtagagatagtgtgtactcccaggaagataaagcaggaggaagcattggcataagtgtgttggacatcagaaagagaaagacagtaactgctgaagcaggggaatactgagaggcagggcatctgagagtcaagtgcacaagatggctagaagatgaactcgattctgtagtttggttttatactccatatggtagaataccctagaaacttctcagcagcctaattatacaaaattgacttggtggaaaagccttgtaccactgttgtattgagaatagacttcttgaagcaaagctgtaagtaaatagccaggtaggaagtctttatagaagtgtaaagagaatagatgggtttgtaaagcatgctctctgggtatggatagaagtgtgaccacattctgattatttcatagaatatcaaatgtaaaaaaagcagcctagtcttcaaatatccaatatcatggaatgtggagggtcaattttggaagagaagaggccagtggtatcaaggaactgcaagaaccacacagagtggcatgaaccatttatattttagccagtctggcttcatggagatcgttgtagcagagctgtgttcatccctcaagcattctgtgtactccagcactttcctagccagcaagtgttggaattgtgttgcaaaaccacctgatcctttcttaggtgatgatgctaaggagcacaaacaaagaatgaaaagcccctggtgagagcaggctggatttctgtgttcctgtttggagcatcatcactgccctgcaagtctgtgtgatcctcccctctgccatagggatatgaaacatgggagtgcttgctcactgataaaccatcacatttgcaggtttctgctttcttgttctagtctcacctatttcttccagttgtcatgtgaccattggcaagaatgtccttaggaagtaattccagtaatacagctgagaaatgtgagtccctaaaatcgctatatagactggaagaagagacagatttctgaagggatgattaacttcttaattttttccagaaagattaagtgggtattatgaaggccactgtataacgtggaacctggtaaatgctggtagtgtatttcttcttcacagcgttaatggcagctgtcagccccagttacccaacttcttcatgtagatgttcagtcttaacctactgtcaggttatgtactacctgacaagagccctgaagatcttttccatcacatgcttattatagctgacactcctgccacagtgatgtgccctgtaggatgagcttggtatgactttcttccatgcatgtcaaaccttggcagtaataatttattgaaaaggtgaacatttggcaccaagagttagacaagaatgaaacctacaagtgtggtaactggtaagaaagaagatatattcaggaatatatctttcagggtttcatgggatatacaggttttcataagatacacagccttcaaaattagaaaggtggagacagatttatctagttaagacctacagtctttgaaactttgaagtattaacctaacaagtatccattggttcaagcaatcataagcaactaagaatcttgctttactcttgttgtccagctcttgatgacttgacagaaggtcaaaatttagggtgggcagaacactcagtttcttaggactaaagtcccagccatttattctacttttccagtttgggggtagtgggattttcttgtcacatgggtatgagttctaatttaatggtgatatagctgtatcctgagaatctctgcccatgcctgacaaatacagaagtggaggctcacagccatccattgcactgagcagagggtccccaaggaaggagctaaagaaagaacccaaggaactgaaggggtttggagttccataggaggaacaacaatatgaaccaaccagtacccccagaactcccagggattaaaccaccaaccaaaggaaggactcaaggcaacaactgcatatgtagtagaggacggccttgtgggacatcaaggggaggagaggcccttggccttgtgaaggctcgatgcctcagtgtaggggaatgccaggacagggaagggggaaagggtgggttagtgagcaggaggggatgggataggggggtttttggagaggaaatgaggaaaggggataaaatttgaaatgtaaataaagaaaatatctaatacaaaagaaaaaataaaacagtccctcgagaatcactctttataagaatcaatcttgttggaaaatgggctaagacattattattcagtcaaggaagggccccatcatgtgtgaagtaatgcacagtacttcaactaccaagggtaagttgatgttaactaatgtgcctggctgtcttagaaaatgcacacatcatggaaaatcttgtcttgcctaaagtaaatttccaccttgtgcagagtatctagaagcacactgaaatgattgtcagaatggattggaaaggcataggtcagcacaaaggaagatattacagactgcaaatgaatgtgcaagaggaggtcagcgatggttcttagctataactgtgctagagtcttgcactgttttgtatcaggactctaacaatggcagcagcctctcacatacccagtataagcacctgcttctcctgcctgttgctttgattgtgaagttgttttccatggaaatctgcaatgtttgtagatttccaatgatcaaaagaggttcccaaaacacagaagtatggaaaaatggtgtctaccatgaggcttcttagtgcttttgatatgctaatattcattgtgatatgctaatgtggattaggactctccaagaaaaagaattaatatgcaatgttaatgaaacttatttgattcagaatccttgttggtttttttgcttttgtttttgttttttaagagaaacatctgttacaatcataagccattattatagtgttccaatagattaaagcttgcagatgttggctgtttcatgaaatcaaatttcttacaccttgatcaactaattttgccttacttaaaaatacttttgctttgccaaatttccttttttcagaatttactctccattttaaactcagaatccacttaattaatctgtatacaggcctagcaaagaaagaacccatggcagtctagcaaagagccttgcgtttgtattttgtactcagtcatatgactataagaagtggactagggaagagtactatattctaggctggaagaagatgccatgatacctttaggaatgacatcaggccaggtggtggtggcacacacctttaatcccagcatttaggaggcagaggcaggcagatttctgagttagacgccagcctggtctacaaagtgagttccaggacagccagggctacacagagaaaccctgtctcagaaaaaaaaacaaaacaaaaaaaaaacaaaaaaaacaaacaaacaaacaaacaaaaacgggttgggggggaatgacatcaggacgtttgagagggagacacagcatcctaaatcatatgaccgtggaggcacttataatgttgatgtccttgcatataaacagggaagtcacaagaattcacatgctacatggcatcctacaaatgggtagattttgtcacagagtgcattccaatgtgtagacaaggagctgaaggccacagaccttgctccttgaatagaaaggactttaggaagtaaaactgaatctggtggaataaatccttaatcccatcattataaggtagatatgaagctgcctccttttcttcccagaagctgccagttgaagtgattagtggtgagggcacctcagaaaggggaggagaggagagcaggatcagaagcagaggaggtagccctgcttgagagaagagggggattggcagggtcagcttaaagttagtaacagtgaggcttgagccagcattttaatgtggatccatttcagtgggaaataaggacagcttatttagttttgacctcattagccctttcagaacactttgccaaatttgttgttatttaatgatcagtttttatattgtgctgggttttttttcatcatatttctgatacattgcttagaacattttaactactctgagggaattcataatcatataaattttataaccaaattgcttcaagtagttgcttaaaggataaaagtatgtgtgtaaaccggcatagccatgcattccccataatgcttagcactgtgtttacacatagcaagcatgcaatgaccatatacttcaatgcattaatcttacctgttggtcaatccaaaaagacctaaatatatttgcaacatctctaaaagtcgatttagaaaaatttggtcatgtacatgtaattaatttagtgcctgtgctcacacaagctagttgtgtatttctcaagataatctaactttgttgtataagttgcttctgttaataatagactttgatgatggctcttgagctttggatattatgaaggatggacgatgcttagcctggttgaagagtttagagaacaagttgactcatgaatcatcttgcttatttcctaatggagtctttgttaggtggcctatgagatcttaatgtgcggtaagataatttgtgcattgtgtccagcaactggagatatagagttatgctttgttatctatacacagataggaaaagctttatacctttcttttgtagtatagcgaggccaatttatttttcattcatttatacttgcagcaaagctgtgacatgattgaagatgaaggtaagggtacagtgtcttgtttccaggagctaagtcagtggggggaagtgacaaggtatcgcacagggaaatacaaggtactgagcatggtagatgaaaatttgtgcccatgtgtagaccatgtttattgcttctttggcataggctacagttatttcttagcctgtgaggacacacagaacatttttaatgggaagaataacataagacttttattttgggtttttcctttggttatatacagtctagactcacaactatctgatgagtgtgaacagctaggaggcccttgtgctgatcatgagaccgtaggatcctagacgctactggaaaggaggccacgagtgtaaagacgggatgctctgtaagaagaatgcaaatgcaaggagaggctttatatggagaaccgacagcaagaggagtggaagtggatctgagggcctggttgtgtccttcatctaggtagttacaaaggttcacatgtggaagctgtgactcgtctgtgttccaccatgtaaaaactctgtaggtgccacgaatgttcggagaatggaattttagaacaacccacctgtctccacagctcccacacggagacctccacttcacccaccccaaatgttatttacccattctgaaaacttgagggttttgtggcttttaatttagaagctaagaggaaaaatgacgacagtttgaaagctctctagacacgggctagtaaccaccccccaccccaacctcagtgctttaacaaaggggctggaagtcactgctcaaacatgtgtttacctgctcctgagttcaatggcctggccttatgcctgacacatggagagactgtctttgcagcccatgtgtagcttcgaagctagttttttgctggaaggtttctaaatacagtgatgatttaataattcagaatataaagtggcagtgggaaactataaatgttaggactgtattattcatgttccctgggcagtttgtactctgagattcactaattagaaatgccattatgccacaagcatatgtatctaattttcttgaatttaattcactgaaaataaaaatcaatcctgattagtgttgatatgtaccctaatgaataagttgccattctcagcgtaagtggggtgaactgtaatttcctttttgtttacaaagctattagctaacttgcttttctgtagtagaaagggctggcttttttttttttttttgaaagtaggaaccataatagacataaaatcttgctgtgtcccagcccagcccagtgaggtcctcatgtcatctcttgacatgtatcatttaaaggatgtacactgtttctggtttgtgtacactctagttcctgagagctcttctttgaaacctgctgttcatgtgagaggactctgagcccctttcaaggatagaagtgccagtgttacctttggttttctgcggagtcgggagagtaattgtgttcagttgcaaccatgaagttgctatgaatgctgggttgaatagctcttgaaactgaagctctggcttgggtcagattcacctccaggatctgttcccggcatttacaataagaatgtaatgaagacgtagggagatagtgtgttagagatgcataaagctcagagcaagcacagcaaaggctgccatcactatgataactctcaggtgtcttgtgctgattctattacgtgtattgtacctgattcttctctaatagtatctatgctttctacctaaaatttaactatacacatggtgcatgcttatcataaaaatcagaacatacaacctaaagttcccaagatcttaaaacttaacattctttaaaagaaaaaccaccatcagtcctattgccttgataacagctgcccagatgttcacaactgtccagatgtccacagatggcccataatttaccaaccaacttgtagttactattctaagtacagctctaaaccactcacccccatgcctcagcaatgtctatgaaaagtgcagatgaaaagggtatttgaccaatatataccaattaagaaagttgagggtgtgatataaaaagctgtgaagcagatgctgtgaggagagctcagggtgaggagaggtatatgaaaaagagatgaaggggcaagagtctgacactaagaaacagctagaggtttttaaagataatgtacattttttatatttatttatttttgtgtgcatctgtgtgtaagagtatttgtgcaggcacatgtgtgtatgtgtgcaggtgaggatacatctgtgtccataattgtggaatccagaagacagccaccagcatagttctcaggaactccatgtacctctttggagatagggaatctcactgggctagagcttacctattagaatggactggcaagtgagcttcacatatcctcctgtatatactcctatatgtgcctatatactcccttgacccagtgatggggttataatctcatggcaccatacccagaatttttctgttaacttttgggaatatgtgctttatccaggtcactcagaggaattcaggtctatgtgcttacaaagcaaacactttgttgattaaaaaaaagaaaaaaaaacccacactagtctaataacctgcagtttttaattcccagttcttttggctgcctgacaattgatacatctagggattatttgcatatgtaaccccttagaagtgatctgaactgatgaaaccaatatattattcagctagctttttaaatcaacattataaaatctataactgtataagcaaatgtggtatactatttcttttaaagtctacacatattgtggtggattagagagaataaagaaaatgggtttacttggcataaaagaaaaagaaaacacaggagagaaaagcaattttggtacttaattttactttctttgattttttttttttagaattcttgtttctaattaaaatctttttttctacttctttctaactcactcttccttctatctctgatataacattagtaaagggtaagtgcaggtttacgactttcttcttaactttagaggcatcttagtgatatagagaccaatgccggttactaggacaattttggtgaagttggttgttataataaagacaagatcagctctaggctagtgaaatctctccaaccttatgctaaaatttgatatggaatagaatgacctctcttctatcccagtttctcttacaagtggaccttgcattcaaatagtttttcatcagcttatattaccttattgaattcctttctcaaaattccagtatctctgaaggttttaaatacttttcgataggcggcacacaacacaaagtatttaatgagagtcacttctaagacacaagaggtacagtgcagattctggctagcatggagcatagactaaatgaagactagagaaagacaatgtctggctcacatgtgaaggtctggagaggtcctatgttaatggttcattgaaaagatgatccaaggaaaacagggacctttagaggtgaggtgggaggagagccattctggcaccagagacttctgaagaagaaccttcgtgttgtatcaaagtgcagccactacagttgctctaatggaccacacaaaacccacacacatcactgatgagtctcattctttaacctctgaaatatcatcaataaaggtgggcttcggggaatttaataggaagcaaataatggttaaaccatgatccccagaattggctttccatgtcagtattttaggtaactccgtctaaggtcagaggtcacatctaagactcataaatggaaggtaattagaaaaaaatcagggttgatgtttgttgcgaataagcacaaaggtgtccataaagaaaagattgttattaagaatttagtgagtgctgcttgacctaagaacaaacaaaatggaatgaatgcagaatgtattttgttccgaaccttccctgacatcatgactttatctgctgccattagcaactcactagtggaggcctctgcagttaattgctcgaatatagatttttctttcctctacaaattattcagttctgaaaaataaactactgatcatatgctttgaatggttataagtttatttgtatacttattattatattattatatttaaaatgtaatctttcaaatttcacattttcaaaaatgtggtttgggataattaagattagtatttaactacaggaagttgtgcatactctttgaagctgataatctcttttttggcatatttcaaatacatgggtttttgagaatatgacataactataacattttctccttcccccttctctcttcaagccctcccatagagcctccccactccacttcaaattcatggcctgttttttttcattaattgttattgcatgcacatatgtatatgtatgcccaatggaaatgatgcatctataaaacattcctgcatctactgcttagggaacaatgtggaagggggcatggaaagatagcaagagctggagaataagggattttgccgtgatattgtgtgtcatagtgaggtcagaagctacatccatagtctcaccagcaggactgcccaaatgtcaacagaacaaagttgataccattgaacattccaaactagacagggaacggcccatggggatctaatcaatcacaaagaactaaagacaatccatcagatttgggagtgaagaggtcttcttccccggggaaaggtaccccaattggttgttcagtgccaaatgttttagccctaagaacataatgtctctttaaactttagtcccagtgtactggctagtatacaatatgtactccattaaaatacagtaaatctaacagctcttacgtgatactgatatttagcattacttatactggcatcattcaattttttcaaaatatttgcatgaatcctttgagaatttcatacatgttatttagatcatatcccctcccaatttcttcattaactcctctgagatctacccaatctgaatctattttttttgcaaaacattaagcactcacttaggactttataagaagaatgggtactttcagtgtttaaagcataaaaccatatttaatgttgaaaagctttgtttacaaaatcactctggcacaatgacatgtaggataagaggcactctaccttcctgtctcaggttctcgccaactgagagctactctgctttattgtggtttaaattattatagttgcatatctaatcagacttagtggcttttaaaaaagaactacaatttattatgtcacgaatctgtgacttatggaggtcctggggacatgaattatttctatttcatttagtattgactggaatgatttgattgggcctgagagagccaccctttaagtggctcacctgaatagctgctatgctgatgcagttacactgtgtgctgtacacacaatcacacttcagtggcctcatctttcataacttgaatacgctgaaaacggatgattagatgtaatcttaaatgttatcataaatgcatgctcatatggatatttaaaattatttggtctaaggtcaaaactgttggctagggttctttattcctctctatgaaaatgtatctaggagactttagcttcctcatgaaatggcaactaaaattttcagagatgtttaaataacgaaaagctagaattaactaatttttcaaggcttgggcctagatattattgtgaagccacagtcaacccatacaattggggtatgacaagatttaaggagaaagggactctgcctctggatgacagggtatccaagtatttatcactatctttaatcatttataattttctctaccgcaatctttttataacggctaaagcaaaaagtaagactttatgtaagacatttattaacacataggccaagattattaaaaccaaagattccaaaattagcagttgtgttttgtctaaaagaccacaaaaattatattaaaaacatacttctgaaattgtcacatatcatgttgtcattattactatggtattgactatctctgctcagagagagaaaaacagtgtgaggtatctccacacagctggagaaggagccatctccatgctgagcatttttggttgctaagtagcaatggggttttccaattcatttattatgtcaatgtgactcggccaaatagaacttttctttttggcaaactgtctcttgtttgtttggttttttatttgtagaatagaatttactagaaaaatattaaacagctgctatatttggggaactgtatgttctttgaggggaaatatagaaatgagggtaaaggaaaagggctatgctcattttgtagactttgcctccccagtgtggaagatgaataattaataaataaacacataaatataaattagaggagagataatgatgcttcagtcagggatcttgagaatactggtgcaagagaatgttcagccagtgtgatcaggggaaaacccctgagaggaatggagttttaagcagaggagaagaggatactggtgaagcaaagggaaaatagatgcttagcggggtagaaaagatgaagcacatggtcatttgtggcaaggagcacatagttgggtattgcttattatttgctcagtctccacatatattttgtggggaattaagttatttacatttcacataattattaagtaatatcttgcttctgtcattttgtggctggttcttcgtttttctaatatctttctccttgtatggtcttctttatcacgcttgagtgattttttttcccctaagaggaggttttgattcctcacttattattattagtctgttattgggttttgctttggctacagtgggacttaaaaaaacaagaacctatttgattaaaaagtaaggctttttgaaatgagagtggtataaacactgatcataaaatgcgccaagaaacaagaggataaagaagagggagaggagagacaaaaaaaaccactgtttatatttacccgtttctcatagtgagttttgatgtcctgttgtaaatctttctatattacctacttcaaatagtaatgtagttattaattttgattgctctgctttttgtgtgcatgctagatgtaactggtttatgtactgtgtttatgtgttaggaagtttttagtttgtgtagctccttttactaatgagttttaaatgtccagtattttcttgctggttagcagcttttctatttgaagaatttagttttcttttccttttttctttggacatgtcaggtagtgattttttttcagcttctgtttgtctgaggatatctttatatctgaaccccagccttactaggtatagtatcctttattgatagcttattttctcctagcacaatggtttgtaaccttctaaatgctgtgaccctgtaatacactttctcatgttgtggtaatccccaaccatacaattattttgttgcaacttcataactgtaattttgttgctgttatgaattgtaatgtaaatatctgagatccaggatatatgatatgcgacccctgtggaggttgctacccacaggttgagaaacattgtctggcatgtgtgacaatctcatcatactacttgtttctagcctatggtgtttctactgaaagtagataattgcaacatgtatgtgcacgtatatatgtgtatatgtttgtgcatatgtgtgcatatatgtctatgtacattatgtgtgtgtgtgtgtgtgtgtgtgtgttgctctcttgcattctcaagaaatttctctttgcattgaaactctgagagttgatttggggatagatttcattgaatcgaatcaagcatggtgaccctggaacccaagtatggtgacattgaccttcatgtaccagtatttttctttcttttcattttgggactgggcagttttctgttactgtcattttgagtgtgcttttctctctttaacaatcaacagactctcttgaataacacaccataagtggctgctcttctaatgctgtctcaaagccactatgaactttttctgattttcattcttttttctttcttctcctttgatagtctgttgtgagtttgctaactgtttattctattatccatttcgtattctgtgtaccttatgttaatgtataagttactacagtcctcttagtcttctttgataaaatattgagttgtttctctatgtttccttgaagtttgcgcaatctccttaaaggctttaaaaaaaaatcccatggctgtgtataaaaactgattactacatagtcagttattggcacttgattttgtcctttatcgttagttgaagatatggctttgtttttgtctgtctcagaagtttagcatcttctttgtggctgcagttatttcagcagtggatgagaacttaggttcaggttagccacaagtctacactggagtactcctgtctctcacgggttggggtgaacccagatacctcatccaaagttatcgttgtgtagtcagaagccacgggattattctgtctctctctggactccatgctgaggggactgttcataagctcccatgagccatccatgctacaatactattgtatccaaactccaaattcatctggggctcatctcaatgcaacctagagtcacagtccatgcaactgctgcctgtggatggtgtattctcgccttgtaaccccttaagctacacagaggtaatgtccagaatacagatatgttttactggggcctcaggtctttgtctggcagcaggacaagtccagaagtggcattagctttggtgtagaaatttaagctctgatggttaactacacataaaggatacgtaattccatgactactgacaagttttaaaacctgggaattattatagaacataattagtgcacagtctcattactgtgtagttattcattatttctttgaaaaaaattcactttgcttgtttcttttctgaaaacatatatttgcatattataaatgattattgtctattaatttgttcatcttgttgctgtttctgtgcttaagtacaacagtgatggacaggggatatcatatctatgattacctttgtttgggatggggtgttgcttttaaataggattattctaacttttaaagacccaatttagaaatatttctacccatttttaattaaaaaccacatatttaaaaaaatcatccttctctgttattcaaatccctaataacaacaaaaaaaataaaaactatgcaaaacaacaacttatgttgtggaattacatgttacactcagaggagaacatctgatttcagagaaacaatgaccatctaccccaaaatatagacaggatcccaagttactttgctagttggattttacattatttatttctgacagaatttggctgtgaaacttcaaaggcacatagctcatgttttcactcaagaagtgatcttttttttttttccttcaagtgcttggaagatgatagaaataatctctgctgctcacacctgttggtgagaagcttctagaattcctgcacttgctacatggtgtttattgaaaaccagagtacagtgccacctgttttcaacagtgtttcctgctcataagaaagtgatggggaagaggtgatgcaggataaagctgtggatgcatgttcagttggggtttgaacccagtgtcttttacaaagtttccccacagtaggtccttgttagcagactgactgggtccagagagaggagagccagtatagtctaggttcatacctaggcagcactcatttccattcataggtccttgtagacaaatcacaaccattgcaaaatgatgggctcaaaacatgtctacgtctttctgtacagacacgagtgtaatgactccatcactctgacagttttatttcagcttttagtttcatccctgcttatctacacaaagttccaaaagtggaactttagtttgtccccatccgtgtatttctgctgttctgtcaaaaaatatttacaaccaaagaagtactccaaaagctgagggagtcagctggaagagaagtgtgcacttctaagtgagacttgattaggcttcccttgggagggtgtagctgggggaacaaaaggccagaaatgctgcaggctggtgggatggcatagtggttaaggcgcttgccacataagcctggtgacctgagttctatcccagagccaatggaaaggtgagaggagagacctaacgccacaaagttgtctctgacctttatacacatggttgtgagtacgtgtacatgcacgctcacacgggcacacacactcaaatacacacacacacacacacacacacacacacacacacatgctaaggcacacatgctaaggcacacacagtaataataataagccaagagaacggggctagagattttaacaaatttataaccttgtgccacttgattctttatgaaatattcatgtcactttcatggatctccatgttgtttggcatggtgaagcccactgagtgcatgactcttgttttgtggtaatctttctagagagcataccaggtaccaagcagtgtagtcaggacttccttcataaatgttaacctctcgaagttaaccaagatatttctgtaacatgatttactgatttagtcaatgtaagtttttttttcacttgagatatctattttatttctattgtttcttttatttcagctcttctttatgcaactatttttggaaatgttaccacaattttccagcaaatgtatgccaacaccaaccgttaccatgagatgctgaataatgttcgagatttcctgaaattatatcaggtcccaaaaggccttagtgaacgagtgatggattatattgtctcaacatggtcaatgtcaaaaggcatcgacacagagaaggtattgtagtttttattatttttattgctattattattattagttatgtttaaacaggatatttagatgtatgtacatttcccattcacaattgccctgtgcaattgctttagaaatgttactatattttttgcaagtgacatttcaatcaatcacatttattgagtgctcagaaggtgcggagtatccaaccattaacaatcaattagtaccagtcatgatattcaatcgagaaaatttagtttctgaatacagctcattgttccattcccctgtgatactctgattaacacttagtaattttctgctaaactctctgagcaagcactctcctaaaagaactgttgtcagttttccctttgacttgctgtccagttaaaaatatcaggggctggggacatggctcagcagttgagagagctttctgctcttgctaccatctggaattatgtttctagtatctatgtctggcagcttacagctgcctgtaactcttgcttcaagagatcacaaccctcttctggcctctgtgggtatctgcatatatatgtgtgtgtgtgtgacttgtgacacacacacacacacacacacattcacacactcatacacacacattttaacaagattgccttatttagtatcaatgggaggggaagcccttggtcctgtggaagcttgatgccccagtgtaagggaggggtgaggcaggagtgggtagatgagggagtaccctcttagaggcaaagtggattgggggataggatgcagggttcccagaggggagaccaggaaaggggacaacatttgaaatgtaaataaataaaataaccattttttcctgtttatgtagccagtctgttagtctatgtctttttattggggaattgagtccattgatattaaagagatattaaggaaaagtaattgttacttcctgttttttattagatattttctttatttacatttcaagtgctatcctgaaagtcccctatatcctctccccaccctgctctgcaacccacccactcctgcttcctggccctggcattctcctgtactggggcatatgatcttcgcaagaccaagggcctctcttcctattgatggcctaataggccatcctctgatatatattcaactagagacacaagctctgtgggctactggttagttcatattgttgttccccctatagggttgcagaccccttcagctccttaggtactttctctagctccttcatttgggctgaagagatggctcagctgttaaagactaggctcataaccaaaaagcattatttttaaaatggaaaaaaaaacccagaatgaaacttccctgttataagtgaaatttttgtattatcttctatcatattttcttctttatttctatcacatgcataagcaatttttaatcttcccttggtttttcattcaagtagtagagacatacctcttccagttattctcatgtctcatttcttggttttgaatgggagctgcttcctccccgcccccatctatcttatccttggacaaagaagaacccaaagttccccattaagagcaaattaaagtctcctcactgtctacatacaaaatatatttttatatacctataaaaatatgggtatatttttctataccatttgattaacataaaatgaaagggatagcaactagagctggcacacaggaagtaagagccaatcctgagttattccacgtgataagcatcagtgaagactggcttttgtagagcacctacttctgacacctgacagtcaaattgcaagagactttccttgccatttttaggtggtatgtgttttttgtcatgtgtgtgcatatgtgtgtgtgtgtgtgtgtgtgtgtgtgtgtgtgagagagagagagagagagagagagagagagagagagagagagagagagagtcacctagttaaatgaccacagaagaaaaatcaattaaagtatatttcttcgcaacttgattaatattcattgatatgtggctagtgggaaaacatgcacagaacctttgccacagagacaaaaaggcaaaatcacaaacactgttaaggatgttgaagaaaggaagcatttatatactgttgcaatgggaattagtgcaatggctattgagcacaggatattgcttcaaaaaactaaaaccaaatctgccacaggacctatctgtcccacttctgggtaactatgaagttaaaggagaccatcatacaaaggagatgtctgcacccccgtgcttactgttgcaccattctcaatagtcaagataagtaaacatttaaagataaacaaggaaatcctgttatgtgaaacaaaatgggtggggccagagaacattatgttaaatgaaattagacttagaagaacctagaatgagaagacctcatgtcatctcctattcagagaactcaaaaagacaatttacatgtagaatggtagttatcagggaaggggaatggagaggagcagaggggtaagtcagaaggaggttgggtgaaggttccaaatcacacttcgagttgctcttgaaaacctaggaaagcagatttgagttgatgtgacaaatataaaagctttgctgtgtgtgcatgtgtgaaacatgtcatgagtaatgatcccgttcaacctactagggaactccccactcagatcagatgcatgttagctccggtgataatgtacataatgagaacaagacacaagccaattctgggcatgaagaggctatgtgaggattcctagtaattacatctgcagtgagaccatgtttaaaagcgcttcatgccatatgctcccaaacaagaagaaaacaaaaatctatatccacttctgtgacataagtcaagaatctaataatagaacagaagactcacaggcctgctggtcatcttgttagctagtaaatagtaaacataacacataacattaaagttcaggtaaaataaaacacacaccatttaacataaagatgttggcaaaaagcaactagaaaaatggctcagagtttaagggcagttacagctcttgcagagaactccattttagttcccagctctataatagtgagtcacaactctctgtaactatagctgtagggcagtggttctcaaccttcctaatggtgcaagcctttaatacagttcctcatgttttggtggccccaaaccataaaatagtttaattgatacttcatagctggaattttgctattgttataaattgtaatataaatatctgtgttttccgatgttcttaggtgactcttgtgagaagggtgtttgatctttgctctcaaaagagtcaggacccaaaggttgagaaccatgactctagagggatacattctttttgtctctatggagtcccccactaacacacacacacacacacacaagagagagagggagagagagagagagagagagagagagagagagagagagagagagagagagagagagacagagagacagagagacagagagacagagagacagagagacagagagacagagagaaacagagacacacatacattaacaaaaataagttattgaaacattttgagtagaaattaagcatcacagcaaaagtgcaaaatcagtttttataatttgtaaaatatttttataaatcagtaagtttaaaatacattggcaactaagtgagccaaaggcatgattaaggttatttaaacactgaaaaatgtaatgttggttgcattatgctgacttagtaaaatagtgcttgcagattctcctccaataactgcgacttcactagcactaagaattagctaggttttcagtaccagacatggttttacccttgttgagtgtgtcttgagtccaattagagagctgttggctaggtatccatgccactaatgtacacttagggttactgttccaggatgattgttaatgtggttcacaggcattgtaactggtagtaccttcctcctttcgaagctctcatagcaccttctgataccatgaaagctagtcttcagagagggagcatttgggttaccaacatgactgctcaaatgggagctagacaatgaggacaccgatgataatgttaaactggacagagtttaagccataacactacaaccttactttcccagagacgagcacaccaattggctgtctggtgccaaacaatcagccctgaaaacacaaaagatcatactgactgaacaggttatatttgggatatatgcatacttattatatatgtgcctataataacaattagtgaaaaaagaggtcatgaattggaaagagaaaaggaagggtgtggggttgaggaaaaggaagggagaaatattgttactaaagtataatttcaaaaaatataatatgaataaagggtgtatcactagtttacattaaacaaagctcaccttcctctctaacagtaaaaatcaagtcattaagaagccatttttaggcagatacaaaaatgccccatttttgcaaagaatgtattgcctggccctggctctactgtgtaattctgtatactgtgtgaatgggttgagtattttctaaagcaatttgaatgagctaatatgtattggggctggcactagagctcagccctgtggctttctagttttttgtcttttgttattgcagtgataccagcccttgttgtgactttaaaggcatattctaataacactccctccagtgtcccagttcaccacagacccgatctcaaatgaaaactctgctctgctctgcaggcccaaggaatctgtccaagaattagactgctcccagttatcttttaaagatatgttctactgatattccccaatccatttaatggaagctgcaccttccagttccttaggacaaccctccttagccctatctaccttcacttcccttcgcttccattgtggtccctagatccaagccatcatcttgccctgctctgtgcttctgtgtaggatgttctcagcgtagcaacaaagaacctatgtggcttttctgtttgttgatctaatcttgtcaatatatttaggacattatatgtgaatcttgctacaagtacttacagtggaatttattaaaattatcaaaatataattgtggagtgataaaatgaaaggtggaaaacagtaattatatcagtcctgtactcagggtgcatccatagaaaagagtatcagaatttttaacaattactctctttgattcactgtttggttcctatattctttaatatgtgaagtatgttgtcttaacatatgttaacataattttttattgcatagctcacttacattttctttaaaatatttttattaatagatattattatgaaacttatacaagcacacaccaaaacaaggaaaataaatgaagctcaatatcttttgaaatgtctctttctctgttggttctaaaatagttattttttttcagctctgtgtacaatggaatttaatgatgcattgcagctaattaaagaaaaatctttgcttcaattattgtgatttcctcctagcttctccacatacttagtttgtagatttttgaatttaacattaacacatgagcaaattaatcccagtgatttaagtcagccttaaccagcttctgtttagtccaattactatattcatgtggggattagaacattttttaccaggaaaatttgttgtaggtgattttttttccactgggcagtgtctagactaattttatctactggccaacagtttattgactatcaatcattacaggtacttagtatctttttaatttaataacaaaaatccatcccctgctctttgccactggctgacattttgtacttaaaagagaaagggttggaatggggggatttaaaacaaaagaagattatggggaacaatagaagggatgatgactaaagctcataaaatttatcctgacatttgaaatacttttcaggaaaacaattcaaatgaaatcagtgggctagcactatattttcaatttgcaggacgacttataaaaatgtacaacttatataatgttttatagatcaggtaactctcattaccctagggtgtccatgacctctttaacaggttagatactaaacccttatgatttttatttacaacttttactacctttctagccctaacactaattttaataaccagtatgaattctcagatcacacattgtatattatgtagtcattacatctctctctacgtatatatgtagactagacaaaagctacaaaggattaaagagaccacagcatccatggaattcaacaaggccttaatggccccctagacagaggctgatacaaataaaaaaggggaattcaaggtcacagggttgatcttggcatcagcatagactgtagcttcagacataatatgcagaaccagatctagctggcctaatgaatgtatttatggatggcaatttctgtaggctgtggcacaggtctcctggaacattcaggagccctcttactgtcagttgtgtgatgttttcttggcatggacaggtgacaggctcataggagctgttgtgacttcagtgttaggtgtcatttctattgtgtccagatgggagtactgtatgtgtcctcagtctggtgtattatttttctgccttttttattgccttatctctgttccatagtgacaatgggacatgctccttacacctggaggaaaatactgtactacaccatccttcataaagagctctgactagtgcgctctgctgaatttatcatataaatatatcacagggatataagaaaggcaacctggctcaggctgaagattcagtagtatttttatctttggtttaaaagaggtaacaattgccacaatagagttcatattaattagatcaataattgtgatcaccttccaactagatatttcaaagaaataacatcaaagggcaaaaacttactcaaagatgaacaaggtgatatacaattctgaccatattaacatatgacagacaaataaaggaaatgtaaatattctatctagttaagaagagagttgaagagaggggtggaaggtagcttcaaaaaactaaatctatttgaagaacagatctctctgcttcagaaaaaaaaacatatttctcaaataaaggatttagatagacacagcagaacgcagacccagtgcactctcaggtcctgcacactactcttgctgcctctccactatccggttcttgttatctctactgaatgaatttaggtggagcactcaggcctagagtagaaaaaaaaaaagactgtattttataggatgacatgaagcactcccaaagttgagagacggctcattgtataggaaagtataattacgggttgagactggacaacagtgaaggaatcactgtgccgacctagaggtttaagtagacgtggtgctattttcttaaggaccaaatagcatcctgagaggtggttttctgtgcaaggtgattgacaggactatttgggttaacttttaaggaagaagcaatgttgtgtctttttttttttctttctttctttctttgttagaacgcctccagctagatagtaatcttatcattgtcctagaagttcagaaagtcatgtttctatgcagggattcagatacaattcttttgatcagtttctgcttttacaagctgataaagaggtgggaggaagagagagggaggaagggagggaggcagtgatagagaaggaagggagaggaattggggggaagggaaatagagagagatgataggtagataggtaggtggatagatagatagatagatagatagatagatagatagatagatagagagagagagagagagagagagatgattttagatgttgataacatgccagagagagagagagagagagagagagagagagaagggaagggggtccttaattcccttagaacctgctcctatgtgaacactttcctaatactgactatgagagcacatcagtacatcataatatctgtgccacttggggttctactatttgtcacacctggttcaaggacagtcattttaaaagttctgcatgaaatttacagaaaaaaaaacaatcctatgataatttaacacttgttttcagcacttgttttctttttccattggtctgtgtgtgtatgtgtgtgtgtgtgtgtgtgtgtgtggttgtgtacatggatacatgtggaggcctaagctttatgttaagtactaaccttaagtgttcttccaccttccttattgaggaggcagcacctctcagtcacttccagagctctctagtgtggatgctgattcctccttctctcatcagaattatagaccaacttccctacacatccaatatttttgtgggttctggggatctggctcaggtcctaacatttgctagctaagcactttaactactgagccatctctccaactctgttctcaggattcttttattaacgtacttgaacggataggttcacaaggatagtaactagcttactgaagatgataaaagaagtactcacttaaaaataccatggatttatagattctttaatggagtcaaggtagggcagccatggaatgtttctcctataggcctatgttaactgcttattggacaagagactatatgcctattccactgcttaaaattaattaattgattaattaattattaagcaactacacgtttcaccctaacttttaaatttagaaaaatcttttaagttttcaatctaaccatggtaaaggaatgccacaatcatcacctttgcacgtgtttctcaattgtgacctcctaaagagcgaaaaagggagaatgtgggcttgggatggccttttctcccttttagctagccttcattcctagctaagaaagtaaatttcatgtgcagcttctcccatggagcagaagttgaataagatagcactccagggcacattagaggtgaatataaacacaatacattatattcacatattaaagtgtcataaagaaaatcatcattttttatagttattacacattaataaaaattctagaaaaataaggaggcagaatggtcttagtaaacacacaataaaattattataggcaaataggaatgttaataatttccgtaataataatttagaatactcaagtgtgaattttaatttctcatggcttttgagaattcttcaatacatcctttgtattactgttggctaatatcattacttttaagctttgtgcatgtcctctaatagacaatgttcttttgctatgcttattttaaggaagaagcatattataggttagttaagtccaaatgacttaaacatttctctggaaataatactaaacagaatctttatatttttgctttattctgttcatactttagtgtaacagtgcaggctagtttatacttcattttctcaccacttggccattagcttctgaggaaggtcacaaggaatcatatgatagctataatagagaaagaaacagatggagtagtccacatgacgccatgatgacttagtaacttggcttgatctagactacaaacatagggtcccatccttctgggtccgcatctctgggtgtgaagaaatagagccacatttctgacctaggtggctggagcataaaaggggtcacatcatgccttcagggggtaggcagtaataaaaggggtgaaccatttcattcacaatgataatcatactcgtcttttcttatctagtcataggctacaaagtttgccatatggctagcatcatatttttggtcttgaaatttagtgagcatgccattgtacttaaatatacagatggaacatgacctgcatcatattttagataagcaaatgtttttatatatgtatacattgagaacaaatatgtgaacatattctagactgtggagaaaagttaatgagtccaatttgtgtgcagaccatgtcatactgtgagttggtgtctctatccagcctgttattttattctgagctgctgatgggtctgttttcagactcgaccccaaacagagcaaattcccagcaatagcacctgcttttgagtgaaatcattaggttccttagaactggacacattttttttaattaaaggtagaattatgcaatcagattttatgactgctttacttaaaatgtgtgttctttccctggagtttctcttactaatattgccatggttttactgtgctgttatttttaaagaaattatttattttattttatgtatatgtgtgtgtgcacctctgtgtgtgtatgtgatccatgtgcaggcaatgctaacaaaggtcagaagagcacatcagatccactggaactggagttacagatggctgagagccaccttaaggatgataggatctgaacctaggacttcaattcaagtgctcttagccactgagccatatctccagcctgattatgttgttgtttattattttccttcagtggtcgtgtgacttccttttctctacccacctcctatctctttcttgagttttatgataatgaataaaggatgcttgttttgggttctggctgatttaaagaatgattttattcattctttaaaaacaacatttagttcctttacttgtcatgccaagtaaccatgggcatctctgcctgacacaacaggaagtagagagaagatggataaagatgtaggggctggataccttaaatagagaaaatagtctcaatacaaaatagttttccttttagctgtgtgttaccctccaatgctctggagcccctcctgatgtgacctcctgatgtgatttttcgcatcaaggagaggaccatatggcttataaacttgatggttttctctcaactttgcctttcataaatctggaattttctcaagtccttcagttaatttcccattttctcacattagcaacctccctcatattttgggcatcctcaaggatgcgttcagttctctagtttcttccagagcatttcagttgataggagacatcaattgaagagtacctgtgtagcagcagattgtatgaatagcaaggtacccttcaatgttcatttctgcataaaaaatattgtcaggctttgtaaaaatagttgtagagggataaatacaaataacacaattatcgctcttatgttacttggaattaatgaaaggagaaaagacaaaaactatggagaaaaacatgcgattgtcaattgtgttgatgcttggactataatgcgggtgctacgctagagtctgatgagcaagattaatctaattcagtttggaaggctgtgtggtggaattagaaaaaaagcataatagaatttggacaacagagattgttagaaatagaaactttgctacctttcataaccaaactcaaattacctatgtgttgatagacaactggtctaaagatgggaaacagtgaaaaggataaagagtcgggatcttaggacactgttaattactgaaaaatcattagttaccctttactatctagatctattcagctaactcttcatgttaaaaattttacacttaatccaataactattccgaatggtacaacaactttttggtacctgaatctgcctaaattccttagcatataattgcttagaatatattaaaatcatgtggatcttctgactttgaggtcattaatcagggactcctgtcatatgctttaatgagagaacagacaatacacagcatcaaggatatatttgtaaccagaggacactgttatcacatctcaatgtgtgagtttgttggaagagtggcacagtccctttataaaaagttgacatgtgctattcctgaaatgtgacttttcaggcaaaaaagaaaaaataatcttgtgattatataaccattttatttctaaaaatgttaatttaatggaaacagatgacttttatgtaaaattggaaataagaacccgaaaaaggagaaagtacattaaatccctcataatctcattccttataaaactacattctggcacatttactttctatggcttcatgagcatctgtgtgttgtaaatatgtatagcctgaaggtcttgcatttgaaatggaaagttgaaattttaaagtctttggattttggatatgttttagattgggaatatatatgtatgtatatatatgtatatgtacgtataatggtatctataaaattcatttttatttcatgtacttcttaagcatataaactaaaggtaatcttatataatgttgttactactttactgcaaccaatctcatgagttcaaatgtagaactattcatttggcatattatatttcaaattaccttttgattcttgtaacagtttgaatatattttgtttgtagaatttaagatgttcaacccctgttgtggaaacctctgtgttcttttctgtgtgagtgtgtgtgtgtacgcatatcaatatatttttatttccctgtgtttatatatttaagatttctgatttttacattaatataaacagtaaaaatggaggtttctggatcatagactttgaacagttcataggttatgctatttttatggttattttttctaaaatatcaaatcgaaactctataaacaatataaatttgtgtacgttcttcttaagaacatcactctcaacacttggtattgaaattgtgaaattaataaaccaattagcagcacattcaattttctctttctttcaacacataatacaattgctgccaacaattacaattacaacagtgtctgtcttgttgaaccaatgattttatttgggtgacttacagaagcgtgggttaggggttacacatttgtcttattaagggttattattgctgtgagaaaacaccgttactaaaaagcaagttagggaggaaagagtttatctggtttacacttccacaatactcttcagcattgaaggaagtcaggtgaggaactcaaatggggcttgaacctggaggcaggagctcatgcagaggccatggaggatgctgcttactggcttgcttcccatggcttggctcaaactttctcttatagaaattagggccatcagctcaggatggcaccacacacaatgggctgtgcctgtacccatccatcactaagaaaacgacttacagctggatcttatggaggcattttttaaaatctgaggttccttcctttcagaactctagcttgtatcaagttgatgtaagattagctagcgcaaatggagcatataggtgactttatcagcagaaagcccctcttgcaggcagctctatgagagatacactgcttttataaccttggatagttgcctggtagatcttgtaactttctaattgtcctcagtcttctgagactctcctacctccagagggtaatgtttcagttcaagggaaacagctacatttacttctccacaccaagcatctggctgtggtagaccagcatgtcttgtcataccttaactgttcctgttttcacatggtctaactcttctgagtaagctttctgccttagcactcaccactatcctgtggctacttaaatatttggatagtattgtttgacatatctcagagctaagctctaccacagaggccatttgaagccatttctagctgctgaggtgaagtattgcttgggagatgtagttggtgatcttgcacacatcccttctaatacaggccagaggttacatcaagaaaccaatgtgaagatctaaggcttcgactttgggagtaaaaccagacactgtagatgggatacaatgtgtaagagactctatcagcattgaagaatctcaggttctagtatgctagtcttccactataattttcagatgatcagtcaaacttaagagtgggattgcatattctttattgatcttttccatggcttgtaagattaaactataaatacacttgttgaaaacatcttatgagaaataaatatagttttctcttagtacccaggaaaatatcagaaagcttggtttaaatgaatggtttagtattctaacacttgtagtaaactctaccttgacaacaaatgaagaattaatgggaaacctcctggagaaaatgagtcactgttgaaacagaaacagagcagtccagccaatggcctccatccagctgccttcgttacaatccctttatctgaagacagtttacaatgatagtgcctatagagattttgtctatctaatctagtcattatttcacttcagagctccctgtaaagtctaaagtcaatggccgtataattttagtatatttgtaataacatgtaattcaataaatcatagggtgcagcatgattagaagtttttcatgtattcagccattctcaacacagttgaaggtccctcttccatatgataaagtgtgctttgtactgtgaatggcagcatatcattatcacgggagctgtttaggaaatgataactggtccacgactggataactttgtaacatacttatacatgactgaagaaaaaagtagaaaattctcttcaaagctgaaagaaaattctctttttttaatgctgaaagatgagacctgacaggaagtttaggtaattcacaaattcttcgaagcattgttatttactttggagatacatttccctattctggaacttaataataagtgttcattaagcatcagtctgtattcggcacattactaagtctttgggatggtaatggtgactatgagacagctcctgccatgaagccgccactctacagtgggaatgactaaatgaagccccatctttggacctctatactggctagttttgtgtcaacttgacacagctggagttatcacagagaaaggagcttcagttgaggaaatgcctccatgagattcaactgtaaggcattttctcaattagtgatcaagggggaaaggccccttgtgggtgggaccatctctgggctggcagtcttgattctataagagagcaggctgagcaagcgaggggaggcaagccagtaaagaacatccctccatggcctctgcatcagctcctgctttctgacctgcttgagttccagtcctgacttcctttggtgatgaacagcaacatggaagagtaagccaaataaaccctttcctccccaacttgcttcttggtcatgatgtttgtgcaggaatagaaaccctggctaagacagacctcccagaactggttttaatgttatgccaacagtactgacctagagtggggcagtacctggaagaatgtagctcaagagtctactgtgctttgtaggactcctaactgtggaagcaggtgtatttttgactcttttgcctgcttttgggactcttctcttctcattagtctgccttgtccaacctcgctgtgaaggcttttgccttgacttattatattttcttttgtcatgcttggttgctgtcttttggaggcatgctcttctctgaaggagggagaacagatctaggaaagatgggagatggaggtgggtgggaggagcagagggagagaaacctgtagtgtgatgcattgtatgagagaaaaatctatttgtaattaaaagaggaacgaacatgttttatttcaaatgtatatgtacgtacatatacaattaatgagaaaaagaggccatgaatttgaagacgagtgggaaggagtgtttgggaagacttggagggagaaatggagtatgccactttattataatctcaaaaataaagtaaaataaaataaaataaaataataaaataaaataaatacaaagttaaaaagagcaagagagcccagcaaaaaataaattacccaagatgccagagctaagtggccaaaacaatttgattctggtttctagaatttcaagtctacagttcatgcttcaggccttatatcacctgcccactcacgtacttcatacctagtagatcccagataatacattaggcacaggagatgaagctgtgaggcagatggcaatctttgcagttatgaatcttgtaagtgcgtatgtgttggggggtagatttaaagagataatagccttaataatattttccagttccccaagaaagtctcggatgatttctgcattgttatcatttgtggtagcagggcttttctgctaacttcgttttctcccttaacagatcgaggaatgatctttcctcactctgataatgagggaaatagactcttcagaacgcactgtgctttgggatacatgaaaacaatattaatccttatgaatgtattgtagttacatgatctctgattactactttgcaagtgttctgaagtcaagtaatagctatgggtgtaataatttttatttctaattttattaatgcataaaagatacgaattttattgaactgaattggtctaattacaactgggaacaatgaagcctggaattttagtaagcttatctggctaatttgaaatgaatattagattaatatcagcatttttcctaatattgagaaaatgttcatacactcgtactagtattatgcttataaaaagctgcttgtatttgtataattagtagagaacatttacaaatatatgcaaatattattttcttgaattccctcaagaaattaagttcttttcaaaaaccataatttaatgaaccaatcgctgagcatcatgaaaacagtcaaagccaacaagcatatggtattccaaggaagcaaccaacgacagtattgataatggtatcacaagcaaacctgttattcattcaaaccatagaacaaaacacacagaaaaagttttgggtttgacatcaacatttggtagaattttaaaactcacattcttgatgttacatttatttgtagctgatttgaagaagtgattgtaataacctctcactaaaaacctttgtttggctttatggggtttattacaaatatttaaatgtagcagagataaaaaaatgagcaaataaacaaaaacctctggtagtctaaatatggcctcctgccaatgtataataactcagaattacagactagccagggggagaagggtcaagccctgagctactctgcatttagacaacaagcagataagaaagagcccaagaggatgataagagacatctaggaataaggtaaaattcgcaattatttgactgagtggaagccaaggcagaaagtgagcaactcttctgaagttttgtaatagataaataaaatataatgaaaagtatcctactaggactttgcctccaggttacaagtgagcttgatgaaggagattgattagggtgctagagacggatgccaccctggagtgaggtaaggagcactgatacataactaagatggtgtagtttcatcagaaagatgatcacatcaacttgtgagagtggtccaaggtgatccgaaaaataacttcaagcacatgtgatggatagatagatctgcaggagagaaaagagcagtcaaaaatgcttatgggatggatggttacacatgtgggaagaaatacagttaggtatttcttttgaccatgataagttggtacatttatcctatacggaaacataaagtagaatttgaggcccacattgacatgatttctttgtactgggatttctcagatcctgatggttttgtgtctgtcagatgaatttaaaagtcttcttccctgcatttgctatcaagctttgtagttgttctccgtggaaagattagtctgctgtaaggtagcttgtctagttggatgtctcctatcttctgatgatgagaggaagtcttcaggctgtgacttacagttagaacaggaaggtctcgtgaggaagggggtgaatgcatgaaatagtcctgttgtcaaatgtgaaggtgtagaagtatgagtgtttattttagaatagttctaaccagcagcagaagtggattgacgtcatctatccaagaaggtagagattatataaatataggagtttttataaataatacaatgagtggaaactaatccaaatgcatacagtgctagcacaaatcaacacaattcaaaatatgaagagaggaggggtagtacatagtgggacagagctgttagatctttaaaaagtaatgaatttctgctaataggtactgtgcctgagtgtgactattgaacatttacaaatatttaattccacagtgactccactattcacccatctgtgaatgttctaataaagtgatccgtgacagtttgtatctgatttcaaggaaatgtagtcttttctcatttagacaatctgaagcagaaaagcaattgacaaagggaaagctaagtgcagaaagttgatgcattcattataaagctgaggaagataccatagagattgaggagcagaaagaacatgaacggagagagtagttggagtgaggcatgctggccatgctgtggtgaacagttaagcatgctgtcaggtgggtcaggagccacagggggagttgaggtctttcagaatgcttttccaaaggactgggtgtcatttgtgagccaggctgagcagtctttcaaatgacaacaaggttctgtagttacaagtcactacaagtagatgcaaagtaaaatttcttcactgtacctagaagtagttacagaaagaaccggattagaaagtcactcaggtcatgggtctacttattggcctttgtaaattagagctaagtggaactatgttgtaatgcttacaataattaaattgttggtgtcattttcctgttttctttttaaaggtttattttattgttaagtgtgtttgtgtgtgtgggggggggctgtgtgtgagcgtatgaacatgcatatatgtgcatgtgtatgcatgcacatgtatatgtgtatgtgtatatgtgtgtgtgtatgtgggtttgtgtgtgagcttatgaacatgcatatgtgtgcatgcacatgtatatgtgtgtgtgtatgtgtgcatgtgtgtgtgtatgtgggtttgtgtgtgagtgtatgaacatgcatatgtgtgcatgtgtgtgcatgcacatgtatatgtgtgtgtatgtgtgcatgtgtgtgtgtgtatgtgggtttgtgtgtgagtgtatgaacatgcatatgtgtgcatgtgtgtgcatgcacatgtatatgtgtgtgtatgtgttcatgtgtgtgtgtatgtgggtttgtgtgtgagtgtatgaacatgcatatgtgtgcatgtgtgtgcatgcacatgtatatgtgtgtgtgtgtgtgtgtgtgtgtgtgtgtgcatgtgtgtgtgtgtgtacaggtgcaggtgtatacagatccttgtaaagaggcttctgatccctccaagaactgaaattaacaggtgattttgagcctcctgatgtggggggtaggaactatgtcctctggaagggtaagaaggctctaaaatgctgggtcacctcttcagcgacctgtttcctgtttatttcaatgtctgagccaattccatgtaaaagaataacattgaaaaatagctgagcataagttcacctttgggagtgagaagtttggtctgctcctccacaaacaccaaaccttgtgctcgtagtgtaggtaagagactgctagttctctagtcattctcatcaaggccctcaagcccttgaactcagtcagaggaggagctatcttctcttcttgattcaccttccttggtatgttagtcagcttgctgttgctgaccaattaaggaaaacaaaatgcccgaggggaagcttccaaagtgggcagatttatctcaggccacagtttcagaagctgagctctcacagtggagtgctttcaatgacatccgtctttaacgaagttagatctcacagtaatgtgtcgggggctccacgtgtgaaaaacgcctgttgatcttggcttaccagagactctagttatctgaaaagttaccaattactttctgcaaaggcccggatatgagaattctatcttttctttctttctgtttgagatacatgcaaccatcagatataaatggaggggttctctaagctcaggttctctacatggtaccctcctgcacacctaggaagtcaaaattaatacgtgttcctaaggctattcagatctgtcagctttataatgactcctctctctttctcttcctctagtctctctttagctctgtcattcaagaatgctatctatccggaatcatataagcttattctgaaatgcctatattaagttgcaagacctagaagagctaagaggttgagtttactatgtggatcataacccactcttctcctcacttctactcaagctgttgcgtagggcaatgctttgctccttcatatttctgagtgcaaccccatgatacagattcatcacagttcagctattcactaactgaaagaaattgtgttgtttcctgtttggaactattacactagagtgtctataatcatacatttgttgttatgttgcatgaaataattatttctttccattgggataatgctcaacactgtaattactgggtcacatggtcagctcacattatttttgtaagaagctgatgtgctccttttcaaagtgactgtggcattctgcatatccactggcagtatatgggacacacttccctggataatctcttagataatcagtatttcctgtgtaggtgagcagtagaatagtgtgtttactctgtgttttcctaatttctaataatattgagcaaattttctcatttgtgtatttatttgttcttcccagtgaaatatctgttcatgtgttttgaccaccttataacagaaatgttaataaatttttgacagtccttatgcatcttagataccagtcccttggtggatatgcagtttgtaagtatttttccagtctgtagtttgtcttttcaatatttttacaacatcttttctcagcacaaaagatttttcattttgtgaaggaacagttaaaaaaaaaaaaagaactctgtttggctttagattctgaacatattctgctatgctcctcaaccccatgtttttgtagcccagttttaaattttattaagtccttttttactttgagttagcatttgtgagatgtgaggttcaatatgggatttcagctttttgaagggaggttcaataatgtccagttgccctgtttccacttgttgaaataggatggtctgtcatccactgagctgcacttgaacctttgtaaagaaatgaactgaacataccttgctctgtgttttacatactctttcattaacctgtgattttctgctaagcctatactttagcactgtggtgtgtgtcaccatgccacacttgctttgtcccccacccctaatgaccttatctctcctaggtcttgcaacttaacatttgaattttagaataagctcgctatgtttgcaaacagatgtcatgggattgtggtgagattgttgtcaatttagattggcgtagagagaatttgtgtatttaccatgctgcagctcctaggttcttgatgtggtatgtcttcattgttttagatgttccttgatttcctgtcgttagcacgtcaccattttaatattatggatccatgtttagctagatttgtatctaagattttcatttccttcagagccagtgggaatggaagtataatttttcattattgaagttaattttggcgtagctttttgaatgctcctttggtaccaggctgtcatctattgtttttctttatatgtcaacatgtcacctgcagtggtgtgtctattcatctcctgtgtttgatcagccatggcagaaatgagattatgttcacaggatttgggactttagtcaaattctttgaggctttgagaggcatctgagagcctctgtcacatgtaaatcttacacgttggtgacagcttctcctcacggagcattcttacttgtttcagtactcatggctattttcttggagatgaaattgtgacaagtttgatttctaaggaaaaaaatgctattattgacatgtctagtttctcagctggaaagtcactgacaacaaattccagcataaataatgtatgaactcaattcaaacccgccccccccccaaaaaaaaaactatctttataatgtcacaatgctgcttccaaaggatgattgcttaggatttaggatattgaagactaaaaattagttcaaaagaatttcttaaacttaaaaaagtgactattctactaaataggattctgtatgtaagaaaagtttggttccaaaaaatattatatcatctggtcaccataatgtcacttgtagtactaagtcaataactcagtagctatcagagttgagtgcttgttttcacatcttatcaataacattgataaaatcctaattaaaacaagtagccctacattggtaatagaaatttccatttacaaattacttaaaaaagaaaaaaaaaacggtttccactacacacagtgaggaaggactttatgattgcaaagttatttgaacaactataaaatgattgcattttccctttaatttgatctgtatggccatctccgtgatcctaagagatttctgacttaaacccccccccccacaagccttcagtgatatctattatttccctgaaagctagatttgtgctgcaaaaaggaaggcttcctttgtaaatttgacagcttaataaatttgtactggttttctggtaatggagataggcaatctgcatcagaaattatctgaaactatgtttgatacacactctcatatattttccactatgtgtaatgtacacagtatagtaatggacactctctgtgcacatgcacgtatagctatggggtggaattagatagtaatgggcactttctgtgcataagcacataatgctatggagtaaaatcagatactcaagcacctcaaagtttacaaatgacacgacttacatttgaacaaattgagttaatggttgtatttttttgtattggagaatgtgagtagtgatatttcatatagtattttgccagagaaatgtctacacacaggtgcacacacatacatttaaatgacacataggcagacaaatgcattctatttatttatttatttatttactattgaaattttaaatttacatttcaaatgttttcccctttccaggtcttcccttcagagaacccctattccaacccccttcctcctacctctatgagggtgcttccctacccactctcctcctcccaccccagcatttccttacactggggtattatatatcctcaggcccaagggcttctcctcccactgatgtccaacacagccattctctgccacatatgtggccggcgccatgggttactccatgtgtattctttggttggtggtccagtccccaggaatttggaggggtctgccctgttgatactgttgctcccttcatggggctacaaacccacttggctccttcattcccttctctaactcctctatctaggaccccggatctcagtccaatggttggctgcgagtttcctcctctctctttgtcaggctctggcagagcctctcaaaattgcttcaagtttctctccatttagtttaatgttggctactggtttgctgcatattccttttattatgtttagttatgggccttgaattcctgatctttccaagacttttaacatgaaggggtgttaaattttgtcaaatgctttttcagcatctaatgaaatgatcatgtgtcctggatttcctgaatgctttgggtttggagctttttgaatttcacattttctttgactgttgtgtcaatgttttctatggtatcttttgcacctgagattctctcttctatctcttgcattctgttggtgttgcttgcatctatgactcttgatctctttcttaggttttctatcttcagggtcgtctgcctttgtgatttctttattgtttctatttccatttttagatcctggatggttttgttcaattcctttgcctgtttggttgtgttttcctgtaattctttaagggatttttatgtttcctctttatgggattctacctgtttgcctatgttctcttgtatttctttaaagtagttatttatgtacttcttaaagtcctctaccatcatcataagatgtgattttaaatcagagtcttgcttttctcgtgtgttggggtatccagggctcgctgtggtgggagaactcagttctgatgatgccaagtagccttggtttctattgcttatgttcttgcccttgccttttgccatctggttatctctggtgttagttggttttgctgtctctgactgtggcttgttcctcctgaaatcctctgtgttagtactcctcctgggagaccagttctttataggaggaatttgggtgtgaggagccttggtacagggttagctctggggtgcatacagaaaccagaaggatcctgtccccagctcctccttaatttctgtgtcctgatggctgtgggaggttccctctggggccaggaatctgatgagaagtggtggtcttacctgtgcttacaggcttgtctgcactcctgggagaccagctctctctgggcagtatttttgtatgtaattctgtggcacagaatcagcttctggtgcagacagaaactggaaggctcctgtcccaggctgctccttggttcctgggctctgggagggttcatctgagcagcagtggtggtgctcatagacttggctgcactcctgggtggctagctctctcctggagcgatttgggtatggagccctgtggtagaggatcagctccggtctgacagaaactggaaggtcacattctatttatttatttatttaaataccatgtaagtgttatgagggtcaagatttttttttcaatgcctggcacttttgactcgtttgtattgacatctaaattttcttcagtgccttattcttttctttaaaaagactatcttaaaaattgaggaataggtcacttattatgaaatgcacagttcaatggtttttaagtatattcacaggattctacaactgttaccagcatctgatttcagaacatttttatcatttccaaaagaagtcctatccttttttgggaatatctatccatcactcttttgggacagatagcaacaactttttgtctctatgaatttatatatcctggacctaccatctaagtagaacactataatttatggtcctctgtgacttgcttcttttacttaccaggttttcatagtttgttcacgttgtggcatgttttagtacttaatttgcttataactgaataatatactgtacacatttaccgctttttttaaatcacttaatcagttgatatgtatttggtttgttttctgtagtcactattgtgacagtgaacttcatatagttgaacccacacagtattttctagcattaaattatgtgactttgataaaggctgtcagattatatagctgactgacattggagctggttctaattttagactattgctcgctgacgatctcttatctgacatggttggggatggatgtatttcagaattttagaactggtttagttttgctatgttgcatagatttttaccacttgagtttccatcatttgaaaaatgaaattccagaccatgaaatgtttaacattatgtcgggattcaaataattttagatcttgcagtattttagagtatatttttttaattgggggatgttagacactttgtatgaccaaaggcagcatggaatccttgtgtatgtctttcttaaagcccattgtacacattcatgtaccttaagcagtggtgactccaaaaagttatagccagtaggaagattattatttgtattcttctggaaaattaatcaaatacattaaaatttttcttcctaattttgtaatatttttttcacataaggagaaaggtatgttttacttagtgaaaatttagcatataaaaatgacaggtgagagtgaggtcgggacaatgatacctatagcaattgggtttgttcgtgaatatcgaggtcgtagaacagttctgtgtgttctggggatccaacacaggcctgcaggcatgtcctcaggcttggcaatcaatgcttttacctatccctccatttcccagtcccaacacagatcatgtttcatttgagtcctgtttcttacaaagttactacttctcagcatttgaagctttggccagttaagtagtaaggacagcaattgctccttttttttttttctctgctacatagggcactctgaaagcaaggtcctagtagagacctcataggacgatctctctctatgtttacaataagcgccttgcttcagaattagagtctcttctcaggaaattaatctctgaagtgaaaccaatgggttttaacttatgattcttcactggttattacactcttaagtcgataaaaatgaccttttacatttaaattaagggaagttaatttgccttagtgtcatttcattactttgttaccagcttaattccttggaggtctgacaccctggagactggcagatgaacattagctacagcttctgctcttctgcatgctattttctctctccctcgctccttctctctgtctctctccctctcctctccttccccttcactccacccagtgaactttccctcaaatgaatgagctgcatagttgtgaaacacaccagttattattattattttttgccagtcttaaggctccttacttctaggaaggagcataaagacgtgttatgtgtaaatgtcacttgtctgtctccctccactgatttctccaacttaatatcaattctctgggactcctgaggagagattaattagcagtgcatgactgagttgtatgaaagcaaggaaggattttgaagagtggtagtgatagtcgaagccttttggaatactattaatgtatttgcatagtttgcatatcctgggggcaggaaataaggtcatttgcacaatcccctattattaaaagccctaaagttatatattactcctgatgcaggattttataatcaagcggattttatatctcacagcagagtcctcgggacaaggccccgtcctattcactaccttgtggcccctgcttctacctacaccttaaggacttgtttagggatgtgggtggtggtcagcctgtgagcagtgggctagagatacaggcagaactgcactaagcctaaagctctctctgcttctgctccctacagtgtgcaattctgtcttttcttccgcatgaaattgccttttctttttcacattcatctgagagactcaagcttttggtagagtgttaggagcacacatgattctctcacacacagcgggcttgagtaactccttacacttttgctgagaagcaatttggaaagggtcttaaaagtgtttttatattttacataatggtttttaaagctcatattttgatgatttgatataggcagggtatttgtggctgctgatttatgagagagaaaactggaaatcctgccatctaattacaacataaggcttaagtgcactgtaactatgagggaacaggctgcagtgactgaaaatatgtttttaggtaagccactcgccctcacaaaggcactgtgcttatcttgcatatatttttgcccctctttctttttctcattgttaaaagtttctgttacctgtgtttatgattgtgtgtgcacatacatgtatacacccttgcatgcctggacaagacaactgctgtctcatctctctagcccccatatttcttaacgccatagaccaaatctatcactttcattcttaatgaacctcatctttgcttttaaaattaagtattgcgcgagttaagtattgattatgtgattttgaagaatgatagtagaaaataaactttggagattcaagttttatggacatgacaatataaataagcataaatcgtgtaaaagttcaatatctttaatggctttagttattcatgctatgtacagtaaatgttagagaaagtatggctttaaggctttgcaactgtgagtaagagaggggataaagcaggctctcatggcagtcatttcctcagtggatctgggtgtaacatcatggctcctgtatcaactgtttagatctcctttcttaaagtttcccagttactaataccataatggatgaacgaagtagagaaagggccccaaagggacatgctcactacatatctagctcagggccttttcatctataggtgacggctttcacttctgatgagaaatgacttctgcttaataagtcacggtagcataaggaacttatcaacaagttcttgtgcctttactgacgaagtatgtggaacatgtgtgagctacttgcaagtacttagatacataaacaaatttctagcaaaatcttggctgctcagtgttacagatgggaaactagtgcttttctcttacagtatggacttgattaactgaatcataagttatcttaggactcagtattgtgtctgtgtagtacacgaagcaccagagagtagcagaaagcacaggcttcctagtttattcctggttcatctttagttggaagcatgacttcaaagccaaactagagagttttttgctacttgtttgctgagaatgacctctgcaaaccacacagcctttaggaaaaacatttgtcttatctgtgaatggggcattggaccagaaacagtgatttttcaactgtgcccaattgtaagctccagggaacaaacattgtgatagtttttcttctagacatcgaggacctgtgtaactctggcaatttagccagggctcaaaatccatggttaaatcatgactcaatgtgtgttatgtagaatttcagtccttagagcttctcatagccaaagctagttttgtttatttatttattttatatactaagcataatgtaagggttcattatgaaaacactaaagcactatttcaaagctgaaaaataaaggtttgaaagctcagtcaataagtcctttctttcctcctcctcctcctcctctttcttcttctcctcctcctcctnnnnnnnnnnnnnnnnnnnnnnnnnnnnnnnnnnnnnnnnnnnnnnnnnnnnnnnnnnnnnnnnnnnnnnnnnnnnnnnnnnnnnnnnnnnnnnnnnnnnnnnnnnnnnnnnnnnnnnnnnnnnnnnnnnnnnnnnnnnnnnnnnnnnnnnnnnnnnnnnnnnnnnnnnnnnnnnnnnnnnnnnnnnnnnnnnnnnnnnnnnnnnnnnnnctttatattatatgtgtttgtcagatgaatgtgagacaactaggcaaagaaagcaatgacagacctgccaatcaagagaagagcaggtgtgaagcatctctgggtgcacagtgacttcagaatgatgagaaattgtacggctgaaatgtgcctgtggggaaagagtgaatggtcccaccaaagcccagcaagcctgggaagagctttgcctttacttggtagggaaacaagcaatatatgattgtaagaaagcagaaatatcacagttgcatttattttcctaagagtactgtaagtcacagtgttgagattagaccctcaggtcctgggagaggcctgctgctgcactacttgaccttgagtttaatggagatcataaataaaacaaaagtattttagagttcagagtatggcatccacctgtttttcagagttggttggtagtgttatgaaaaacgatttcttaaatagttcatcattcttccaagggaaaatttattgcttctcttaattaagaatctaatttattaatatgctaacatgatgaaggaggacacaatgcacactggagatgaacagaagttactcctatccctaatcttctccactgcagtattaatttcatttgctggtgattgtgagataccacaaaggtatctctaggaaattagaaaatccaccaaggaaaaaaaatggatgtgaccgtaatggcaaatgacacctcaattagaaccactgtactgcatatgagagttatcatgaatggtgttttcatcctgccacttaaaactacatttttttgcctattcaagttatattatcataatttccagaataaataatgatatatatctataattctggtagcacacatcatgtcagaataattgcttgtctaaggatggagcaggagcttgcctctgcttggtctattttaacactcagttttacttgctgctctatgggcaactgtgagtctatgccatcagtcgatgtaatttaggttttgaaattatcatgtaattacatcatttgccccttcatctcttcaaatcctcccatgtaattccttactctcttccaaatttgtggcatcattttctataattgttgatatgtatacatatacatacacatatacatatacatatatatatacatatatatacatatatatatatatatatatacacacacacacacaatattcctaaataaatacaatccatccagtctgtataatgttacttgtatgcacatgttttcagaatcaaccctaacttttttgctaagattgcaatagagaaacattcctcaagtgttgactacatgctggtgtgctgtgacacggactgcattgtggtatgaactgatgctgtaatgtccatacttagttggtgcatctcaccagacttcagtttccttgagggcaggcctgtatctgtctaactttgccttccaggcatctagcaacttgtctaccgtacatagcatagaacaaatcaatcagcatttgtggcatctttttcttctgaaattgaccctttatctttcccatttgcttactcatttctcactctcttttaggtcctctccatctgtcccaaggacatgagagctgacatctgtgttcatctgaaccggaaggtttttaatgaacatcctgcattccgattggccagcgatggatgtctgcgtgccttggcagtggagttccaaaccattcactgtgctcctggggacctgatttaccatgctggagagagtgtggatgccctctgctttgtggtgtccgggtccttggaagttatccaggatgaggaggtggtggccattttaggtactgtgtaccttcctgactcaatgacaaatggggcactgtcctggagttttagcttcccaagtttctaaacagaaatcccctctgtttggtggctttagaaactcggtcactaatgagatgatgaatttcagtgaaaactggtcactgttttggcaaagaacattagtctcagtcacagctaacagggaacattgggcggagtgacattcacttatacaaaaagtgaccgcagcctaagtggctttgcatactctcattggtaagtggaaccattgttggatgagttatagagggagttgatttcagagacaacagatgtattcagttcagcctgtttctttactcaaaagccaggcaaggctggaaaaaagtatggagacttgcccagctagttagtaaccagtgagggctgagttacttcagcctgctccctacagttctgcctcattatggtggatggatgaagtataaagaagatggtattgaggatgctaataagactcacaggagtgagcacaatggggggagattaaatttaggcttatggaggcggttccatccatctgtcttcacaagccaggaaaattagttggccaacactttattctaaagttcagacactcagagggtaaggttaccaatagcacaacacaaaggggtcgatgctccatgaacttgacaaaacaaaacaaaaacctacagcttaatgtacgtggcaacagtgtaagtgaaatatgcatattttcgcaagcaaaatcgctgaaggaacgtggagatcactttctgctccaatgcccgcagcaggttctacacagataaaacagaaagaaaggagaggccaggtgacatcactcctgagtttttctcaagtaaaataccttagggtcgcacaatgtcaactccactttgatcacattttccatgccttgtgtctcattgaaaaatgagttcgatctttaagctattggattttctctttctactgaggtcatcccaccatagcttgactgtactgattctcctaagaaaaagactgattggtggattttagaaactgcagaagcaaaaatggaaactgatatgaaatagaatgcaaagagtgaaagaaagaaagaaagaaagaaagaaagaaagaagaaagaaagaaagaaagaaagannnnnnnnnnnnnnnnnnnncagcacaaatctagctttcagggaaataatagatatcactgaaggcttgtgggggggggggtttaagtcagaaatctcttaggatcacggagatggccatacagatcaaattaaagggaaaatgcaatcattttatagttgttcaaataactttgcaatcatagggagggaggggggaaaccttatttcaaaaagtacagttattggaaaagacagaatttagaatggagaggaaatgaccttttatgagaaagcagttgctataaaaacagtagaaaatggatcaaggcagcaaaaaataaaatagcattctttgcaaagctttaactatttggaaattactttattgctactgttaggtctcttgcagaaattatttttctttaaatatttttgcaaggaaacaatagagtgcttggaataagcatctggggtgcttgctgctgccttccttcctttgcttttgtctgttggagtataacggaggcataatctttcatgaaagctgtatgtcactggaacagccctttgtggtaaaatgaatcatagttgtgctatgtccactcttacttgctaaaagaataagataaaacacccccccccccaatcagatgtatttgtcttttacttagcccttccttgtcaggaggggctgatgggaaaaacaagcatcaaatacatggtatgggtgccatttatttggcttcattttcttccttacactgcaccttgtaactcctctgacgcctggaaaagctgtgaggacagggactctggcttgggtctgttacaatggagtcatttgctcagtgagacaaatgcattttccttccatctgggaaggaaatgatggctgcctttgcccaatgatactgtgactatgaacacagggtcctcggggttcaggctggtttctgagtgtacatttttattctttattctcccaagtctcaggactcagttgcttgctgtttgcatcacttagtgagtcagattatgtggacacctctctgacaaccttcttccttttatatttttaaaatgggactttaaaagaaactgcttcagccaagaggctattaagagtactttttttctttttctttttcttttttcttttcttttctctttttctttttctttttctttttctttttttctttttcttttcttttctttttttttttttaacatttaagacacctgagcaatgcttcaggagagaaggaggatgagagggatgctaactaactcgccaatgaaacctggcatgcaatgactatcccttactttcttgctcctttcttttaaaaattttattagcctattttgaataattctaaattggaagaaatttaaaaaattcaccaggttgcaagtaagctgtactcaaccttctttgtccttatcctccagtacccccctccccttccctccctcctacctccatttccctccctctgtccccttccctccctcttctcccatctctttcttctccctcctcttttcctctccactccttttccctccccccttcataccattcacttctccctctccttgtcccttgataagtcagatgttttctaaactttcttcagcagcctcacttttcttgttcaggactcatttgccagatgaaaggtagcgaatagaggtcactttaaaattaattcaaatctctggatccagaagcaagtgcagtcttattcttgacagggcactattctttagtgtgtccaaagtgccaagcagtttacagagtcagttctgaagcataactaattagaggaaagattaaaaaaaataacgcagtcaacaaatgcctttattttcacactgggggctggattcaggatgtgttctttaaatagggcatatgaatgtaatcgcagttgatgcctttttccaacttgaagttctttacagttcttacacatccacgcatttttttttctttgaccttcccattttgtatgaaacacaaagaattccaaattaagttcatgatgcattcatattttatattcgctaatgtctttttactttttacttcctactctataattatttaactcgaatagatttgttggtatggttgaaatagccaggttacttccaaatgtcttgacaagtatattgtacctttcagagactgttaaaatagtagcttgctaccaacaataggccttgctcctaagagttgggacttgttttcttcactcttcttcttcttcttcttcttcttcttcttcttcttcttcttcttcttcttcttcttcttcttcttcttcttcttcttcttcttcttcttcttgcttgtcgttcttgatattcagaatcacagggttggaatcttaaactaaggaaattgctgtcttacgcctttcaactttaacttcaaattcgcaggagaactaggactgtgtatgtagaggttggatgaggagtgggacactcctggaagcttggaaggaagtgtaaggggggaaaatggaagggggacaaacgtagaacaaggaggaggatgagctaggtcaagattttactctacgtggaattcactttacatggaatctttaagcattatgtcttataagcatttgtgcctttcaggaaaaacataaaccattgtttgcaaattcaaaatctgcgcctttattttcttctgaaaggaaaatcagatctgagatgtgaacagctaattctttactcttctgagacctgggaaaatgggacattcagcggtagctattgtcttcactctacccttgctataagaaggcaagagctttgtactgtaagctcctggaatgtattattttttctttttctttttctttttcttttttttctttctctccaaatgctcatgttttacatgagctgtgaaatatgtagatttgaactgtgtattatgaagacaagtatcttcagtgtcaacaaattcactctttttatttccttgaagcatacctttgctgcgttttaaatgatgctgattttaatggtttaaatggcatttatgacatttttcatctagagctcttagtattgcctccgagtgcctcatgcagtaaatatcaccagggctgtgaaagcgtctgccttcttgggggtttcaaactctctccctagcactctttaaactaaagtcttttattgtatcttgtgtgtgtgtgcatatgtgcacacttgtgtctgcatatgtttctgcgtgtacatgtgcgtgcatgtatgtgtctgttaaagagagaggacatgagtattgctctttgtgtataatcagtcaactttggcttctgagacagcatttattataaccagccttgaacttgctggccagcaactgagcctcatgaatctgtctgtctctacttctccaactcttgaaagtgtgtggcataactttttgacttaggtgtgttctggaaactgcaactcaagtactcgtgcttgcaaagagaacattttactggctgagccctctcccagatttctactttgtgtatcttaatattatagttacgatcagtaactattactattgcccttacagtttttgtttaaagccctcactgccccagtttgtacccagcttcaaacctccattctgtattctctggcaccagagtggcattgtgtccatctccttgggatttacaccatagctttccagccttgaggattatctatcaccccattatctgccttccttattagcctgacttgggtcattccttctctaccatgctcttttctgaatttcagacacatgcaaaataaaaataaaaacaagtgaatataggtaaaaagggctctattctaattcccccataaacttttcatctttaaatcttgtcatcttccttcttttcttctttaaaatattacttgatgccacttaaagtttataaatagtcatagtccatttaaaaatgtaaatttgaaaaaaactaaaatgactacatttatgattatgtcttcatactaaagtttatgagccaactgtcacttttgcttatagcgatggactgactaataaattaattatgcaattcatgcccagtatttccttgttccctttctgttttgttgatgaaacatcgtcgaatgtgaggtattgaaatctcctaatgatactatattactgtttccttctttatctcctgtcaaagaatatttcctttatatatttatatactccacttctacatagttttacaactgtgatgcagtcttcgaaattggtccctttatcattaagcagtgaccttctttttgtctggtgatctcttttgatggctgtctcatattttcttacatacttttagcctgagtttgtatatcttcaaagataaaaatgtatcaactacaggcagtatacattaaatttttaaaatctgactatattacatattctattcaccactagccacaactggatattgattgcatttaacccctttgtgtctttgattggattgctgcatctattcacattcaacattcttaacattcttattgataggtggacaatggctactttattacttgttttctatctggttgtgtctcctctatccttcttctctctctctctctctctctctctctctctctctctctctctctttctctcattctctccctctctctctccttccttccttccttccttccttcctttcttccttttctctttctttcttttgtctttatgatttggagaatttctgtagtgctaaattttgatttcatgcactttttcttgagtatctattataatttttaaatggatttttgctaaataaatacatttttaactcccctggctcatgaacaaatgtacatgtccattatctgagataatagataaatattaatttgatttgctgtggttacaatttacctacatgtacttttgctggttagttttacgataacttggcaaaggctagcgtcattttgagccgagaacaccaactgagaaattgttcccatgagattagcctgcaggcaagcctatggtacattttcttcattgatgttggctataggagggctcagctcactgtgattgatgccatccctgagttggtagacctgggtactacaagaaagcagagtgagcaatccatgaagaacaagccagtcctcagaattcttccatggcctctgtatcatcccctgcctctaaattcttgccctcagttcctgccctgtcttccctcagtgatggactgtgatgtggaactataagctgaaatgaactctcatcaaatgtggatggaacaactcatcaaatagaaccatagtcatgctccaaacatactcaagaaactacctaagtaaagttcaaaggacctgttggatacattcattatcctcaccaatgaataactgtgatgctttttatacatttttaaacctacatcatcaacatgctaggtaatgtgtctaaggtaatagaaaaccaaatccggctgtcaaactagccccatagcaccacatcccccaagctggttacagctgtattactctttaatcatcttgcaactctacctctgttttgtctttacattttacagtttcttactatgtggacgttaagcactaatttctattttccaatccagtttcctgtggttcagcagtgaaatacttcataaggcttgatgcaaagaactgagaaaatataaatagagcaaacaacagctttcctgttaagtgcgaggttccttcctattttagggctttgggggaggccagtttgcttaagagccgaaatgtttaccgcagggatgacttgcacccagcaggaactgacctaaaaactggcatcagatactctgtagtcatgaagacaaatgggagcttctttgactgaaagtgtgtaaaaaacctttgccaggcagtaaaggctgtgtctttattgggtactccatgcattttgcactatgtacacattgtgtgatatttttctcagaatgtgtaaagtttggaagatgccttgaagaggaacattaatgcgttctgtcccacatggtaaataagtcgttcacttgcatgaagaccactttcccacacttgtagtaaaagagtgctgtgaatcgaatgatatattacatgacatggagggtggacttataatttgaagtgaatgataggacaaatgctcagcttttatatgacatatactcagggaaattttatttactttattttctgaagattttgatgaggaagtagaattacccagatttgttaattttgttatatttctctcataattttgaaggacaagtaggagacaaatttagtcatgggttaatagtctggtttcttattatcctttttgcatcatagatattttcccccagaatcccaaaataatacatgattttagaatgatcatgaaggacaatggtagagttctcaactaacatgcttgaggccccaagtttgatccttaaatttgaaaagaaaaagatcaatttaaaaacttcaaagtagaaataggttaagatttgaatttttcagttaggtaaaataaaatgactagttaatatttgaatgcctacataattcacaactgtgtgtttcggtaagagaagattgtactcatttattatctttgaactcctgaatctcaactaccaatcaatgaaaatttattgacttcttttaggacaatattagagttatccacatttgttaattctgctgaagttctctaatgttttatatttgtacatgccttaaaattttactgtttatctatgaattagtttgctaatttttgctccttttagtaaatgctatatatatatattcatcatatataatattgagaagttgcataatgaaaaacataataaacattatttaaaacctttatttttattactgaaatgcattttcttttagtcgtttttttttttttttatcccttatctaaatttgttttgatgacaacttaatcctagcaaattgactacatatcacggcagaatttgtacaatgcactttggttccatcatgaaaactttctttaaaatgtatattttctgttaataattttagtctttgtgccttagttttattttatatacttcattatggatgttagaggcagttgcagattgtgctgatttcataaaatgagttctccttcagcatccatgaccacattaattccaggtacttacccgggttccaagaaccagagatgattttcctttggatgaagaggccatatgtccaattacagaattgttggtggctcccaagctgtgggtgccacaattgcaccctttgcattattattgtgacatgttggacaatgttgtagtttatagacttcatagatgggcaggacccttgtctactaccttcccatggagtctcgcttggcatcttctgctgctacaaaagcaggcccctggccctactacaaagtaaagaaacagatgacgcaaaacaccgataaaaaatgaacagcaaagtatcacaatagacaccaaagggatccaaaggaataccttaaaagcccttactctacaaatttggaaagtctgaaacaaattaatttctagatccattcatgtaattatttaatccatttttgatctcgtaatataagataaacattttgtatgttatttgtagaaacttattgaagtctttatttattgatattttatacaattttatgtaatttctagtggttttgcatggatggtgtttatttttaactgccaggctgtgactgatagccctaccctgtgagttacttgtgatgggtctaatagttttataaattcctagacctgggactactcagtcaaatacattagctaataccacagtgcctgaaaatcagacagtcgatcatagtcaggaatggtgtaattggtaatttgagaaagtataacagaaatgaatctgaaagaaatataatccttttctatctctttaaggaagagtaagagtctaatgatagtatagaatatgttcctatattagagattttaaaaaacccagaaaaatctaaaagtggatcaaaataaccttaaaaacttgttttagcatcagagactgtgctattatcactgttattgatgtcttgtctttacaaacaatgcatgtacatttaaaagaaagccatgcattatccctatagctctgagagaaactaccatattaatgcatttgtttctaagttttatacacatgtatgggtgatagggtaggagtgtatggtccataaaatgctacattgtatgtatcatttgattttctgattttataatttgatttaatgtgagcatttctgtctgtcgtttcatacaatctatgttacttagtggctatctagtgtttcattatttatcccctgaccttcattttactacacttcattggactgttataaatatttgagcattttcacaagtaaatgtagcacttctgattatgcagttagagtaaacacttttaattggaattgctatcttaaagagaatgccacataaagatttcatataggatgtggtcttatcatgtaagtttctgcctttagtatcaccaggctatcgtaatactgtatcccttgaccatttagctccttggtttctcattttatttcttaggatgactgtaggtatcaaacaactgagtcattaaacagtgacatcaacttcaaggatattttagtggattgaaaaacaaatggattattgaaaatgaattgggcacctaacatgattattttatgccagtcatgtgatctgcatggtgatctggtcaccttcataatatcttacatggtttctgcatctaccatactgtgcctgcctgaccatgagggttggcccatctactactctattctaagaactacccagctgcccatttcaacaaagaatctttgatgtacatcaccaacttctctgtttctttctctcatttctttgattacttccgctttcctttctagtggtgttattgtccttcggggctttatggaacacttcttctttcccctcttctgattttaatctgtaagatgtaaataggtatttgttcctctgtgtgattagaatgcatagagaacaagtcatgcatggaacgcctctaggaaagcttatcccatcagagaacatctctcctgtcttttccattttaaaacatattggcagaaacagaacaaagagagcagatggctgaactttagaagccagagggctcatagagaaccttcctaagcagacaggcctttgagggttattggcatttgacatttcctcaagccctttgtccaaccgggcacttctgatttggaatggtggatgttctcaagcatcagttgatggtgctgctgaagtgaataggttgttctgcaattgtagaatcttaaagatgcatttgcattcaactctagcatgtggctttgattccctgggattaaaagtgtgtgactctcttcgcctccgacagttcagtttcctgcgcttaggaaatcatggttgggggtctctagagctagacttgagaccctgtcaggtttaactatgtagaaagagaagggcctactttgaagatagagatataacatactttaatgtgcttggggagtaattcttagttactgaataattctattaatgtatattgcatcaattatagatttataaaggctataacaacagcttcttggatattacattttgttttgttgtcaaaaatttcctaaaaaacatgagaaaaaaagaagctatttttgctttttctactcagaatgggaaaaattaatgttgcaaaagttattgaaagtatttattaaaatgagagtaatggctactctaacaaatggcatttatttccccaaccctaggtttccatcaacaactaaaatttggggatgtcctcatgatgaaaatgtgctgtgcaatattacatatatacagagggattcatgctttaaattatatagatcaatactacctactaaacaacaacaaaaaaaaacattagtgggtatggtagaaactgttgtcttgtcctgctttctagggaaaggtgacgtgtttggagacatcttctggaaggaaaccacccttgctcatgcgtgtgccaatgtccgggccctgacttactgtgatctgcacatcatcaagcgagaagccttgctcaaggtccttgacttctatacagcatttgcaaactcattttccaggaacctcactctcacttgcaatctaaggaagcgggtatgttgcatcttctttctcttatgagtatccagggggctagcaggctatgttctatcagccaagaatggaaagtacttcattttgaagtgctccattcccatctggatagagtgatgtaattttctttccttttatttacactgtttacttaaagggagaagacactcttattacctaagtaaatatttgagtctttatcatgtcagatgcaaaataaaaactatttgaggagaagcaaataggactggaaactgctatggcatgatatattattagttagaattcagaatgttcatggtccaagaatctagcagttgttcagtctacaaagctggatgtctcagtatatgccagaatctcaaagagataggttcttatgtcagtggcagaatgaatttgctaaaaagaatgaggtcaagcaggcaaagagccagagagtctttcttccatatcctttttttaggctaccaccaaaaggtgtggcccagatttaaggtggatcccacctcaaacaaacagacggacagacagacagacagacagacagacaaaaaacctccagattttaggtagattaagaaagatcaagaaaaataaaacaacaacaacaacaacaacatgaacatcaacaacaaaacaaaccaaaaccctcacaggtatacacagcactttggattttagttaattccaagtgtagtcaagttgacaaccaaagatagccatcacatatggttagttcttggagtttgtgacagtgatctgaaagggatagcaacatctttcttttgaggtgtggatgtctctaaagttgggaagatcaatcaagttggctacttatttcctattctcatgctctttcaatccttctcatctcataatcaacttgcaaagcttccttttcaacaagcctttcaaagaacaccatcagaggagtgaatgaggcatgccacataccctgtaaatagatacaggattcctttactctggtgacattgcaaattcgatcttcattaccatttgtttctttattgatgagtgtgacataaagttaatttgcataaagaaacctcccgtctctaatttatacgtcattgggcattggctaagactcttttatggctgagaatgaaatacacatttgaataactggacttaatgaacttcacataaaatgattgcctgtctatagttaagtattttggaataatgaaccctcctttctatagcctcttaaataaaacctttcttgtagttaacatgaatgcaaacaagacagtcaagagagaaattaatgtctgcactgtagccacgcagaaacaaacagaattaaatcaatgtgcttcttactcagggtcgaagggaagtctaggctgccaggagtggggatactagtgagttttcaaacatttgaattgtattagagctatgtttcagttcatacgtgtgttaacaatttaccattaaatatccagaacctgtgggacaagtacacatgtgtagataacagagatgaaccactgactccctgtgctcaggaagcttcaaatgcatatagtgtgaaatgctagcaatctgacattagccagtgatggatgagggagagggaccaaaacattaaccaaatatgaaatattcttgctggctgttaagtagctcacagttcttgtgttcatatctgccttctgctgtaaggtccccatctacaaacaactgcttgaagctcttatattcataccaactcaaaaatggatcagatttggatttttttttcctatcctgtaaggtggcctaaaaccattgtctatcatcatttacattatgcagaatacatgctgtcatcgtattcttcaaaacagagttctgtttacaacagatctcacttgatatttatgacattttttatatagaatgtggaattacttcttcctccagccatgtgaagaaatcaggccagtggattaatattaaataaccaacagtcctcgttagggttactattgctgtgatgaaacgtcatgaccacaagtgagctgaggaggaaagggtttatttatcttacaattccacatcatagtccaaaacagaaagaagttaggacatgcactccagtggtgcagttacctggaggcaggagctgatgcagaagccatgggggtatgctgctatctggcttgctcctcatgactttctcatcttgctttcttatagaacccacaacttccaacccagggatggcactacccacaataacctggaccctcccccataaattattaatttaagaaataccccatagctggggattatgaaggcatttctcaattgtggctcccttatttcagatgacagcttgtgttaagttgacataaaactagctagcacagcaactgatatggttgcaagccaaagtctcaagaaggaataattcaaacagatcacaaatagaatatacatttctttacaataagttaatcataaatctctgcttcctcttttttttcttgtacactcctgtgcatgtgtttatacaatacaggtacaacacacacacacacacacacacacacacaccacatacaaaccacacatattttgcttgtattagagctgatagactctatagttttgactctcccagttttttgtttttgtttttttgtttttttgttttttttttaattgagctagtagactgagaactcttgtttgtttttacttttagaatcaggatctgggaactatatgcttgtgtctaagggtactactgtgttaagttacagcaagtggcttctccctttccaaatcccttatacctgtatcatttttaatttgttttcataatcccgtcccactgtttttaatggattgtttagtaacttggcaaactgtgagaataggatgtgttgccagtcgctgccacttcattcccagccaaacaaaatgtgaacgagaactgtgaaagagtatctgagtatcttccaatgattagtaatactaactactatttaaacagcaaattttatgtgggcagaatttattttatatgtgataataataataatgtgaacatcccataaacaaggcagaatggtcttcatttcaactataagtagaaggttctgagaaggggatttatacctaccaaataatttgcacgggtcaaggtctggatattaaccattcattgattttacaaacttcttacaacacctgccaaacttttccataaatgtctttcccagacacatgccccacaatttgtaggatgtctcatctgtgcatttactttattccccattgatttactaagtggaaaaaaataaggtttttctttctgttattgtaagaacgatagtgataagcagttgtcacttctataaccaagactatgtttttggtgaggaatagatctcatagtgaccatggctgttcagtaagaatataattctactaagtggggtatcagagtttgaaccaaagttctgagccacagtagcatgcagctctgtccagtgtataaatctgtacatttgctcagtgaagatgttagacactgtgtggtttgcaatggctgtacaagacaggaactaggttattctccggttgcttgccctcataggtttcccttaacagaatgttaagccatagatgtttctattttaaaagttcttgtgaaaaaatgttctggtgattgtatccaacaattagatctgggattagcaaactttttgaattaaggattagacagtaaaaactttagggttgccaatctcagctattcaacttcaccattgtaatgcaagagtgactccttatattagtcaatcataacataatatagccaggaactttaggatgttttatatattaatttcattaaataccagcaacacagtatttcctattgtactcttgcttgagtttgtatttacacaatgctccacagaattccagcatttatatgtcctcaccctttgtggagcctccctctgtcctgtggaaaatgggaagtctcagtggttgtgatacccatggcttggtccagagctgtcagaagttgatttagctatgaattgtaacagagatggtggatatctggaataggacatcataaaaatcaacagtgaggagccttccagtctccatttgcaccccagagttaaccctgtggcccagatctctgtacccaaatccagccaagagagagatggcctcccaggaatgctgtcactcctaagttcacaagtgataccaacacttttgcctcaataactggccaaagaaggaccagctaggagaccacaggacacaggaactgtggagcaactggggacaggatccttctggtctccatctgttccccagagtattccctgtggcacagctctctgcacccaaatcctgcctggagacagctggtctcccaggagtgctgatacacctaagatcagagactaacaggagggacaggctccaatcagagatagcaagactacctaacactagagataaccagatggtgaaaggcaagctcaagaaccaacagaaaccaaggctacttggcaccattagaacccaggtctcccactatagcaagccctggatacccccaacatactggaaaagcaagatttgtatttaaaatcacatctcatgaacatgatagaggactttaagaaggaaataaataactcccttaaggaaatacaaaacacaggtaaacaggtggaagaccttaaagaggaaaaaaaatctaaagaattataggaaaacacaaccaaacaggtaaaggaattgaataaaaccatccaggatctaaaaatggaaatagaaacaataaagaaatcacaaaggaagacaaccctggagacaaaaaaactaggaaagagatcaggagtcatagatacaagctccagaatacaggagatagaagagagaatctcaggttcagaagatagcatagaaaacattgacacaacagtcaaagaaaatacaaaatgcaaaaggatcctaacccaaaagatccaggaaatccaggacacaatgagaagaccaaacctaaggataataggtatagaagagagtgaagattcccaacttaaaaggccagtagatatcttcaacaaaattatagaggagaacttccctaacccaaagaaagagatgcagtgaacataaaagaagcctacagaactctggtcccttgggttcctttctgaactttgcatatggtttccttctcatggtatcttcatggtaggagagggaatgagggaaagcctttcttcttataaagggcactggtgtgaatgtactaataagcaaacactaccttgtttctattaccaataccagaccggtggctacccccgggtttatgtgccagctgctagatgcagaagactagaatttagattgaaacagtagctatgcaaatataaatctttctaccttgaacagaaaccacatctcccttatttgtgacccagccagagggccatcctaaaacaggaagtactatacaaataagagagtctatggagccaggcagagaacacccaggagaagggagaggctggaaattactgtcaagaatggcaaagtcacactgatgggcaaagctcctgcttctcactcaggatgcaaactgcttgactcaatgttagactggtttttcttggtaaacatacacacatacgatacacacacacacacacacacgtatgtatgtgtgtgtgtgtatacatatattactaattttttattatttactaaagtaatttgattatacacatgatctatatgcatatatatgtacatatatatgtacatatacatatgtacatatatatgtatatatatatgtgtatatatagattgtgtgtgtgtaaaatcaaattactgtagcagataataaaaataataataaaacaaaatcattcagttgcttgtaaaatttctgcataaatcaatgaaacaatcaaaagaggcaaagcatgtcatttactttcagcctaagaggttgtgacctaaatggaataaattaatgatccttggcatcacagtgttagaaacctgagattctttgacttgtaacctgtaaatcttgataacaaaagacctctattttacttgtttggggataaattccatctcatagggtgggccttaaatccaatcagatgttggtaggctactcacacaatatttgctcataaagcatagatattacacagatattttcagaatttgtcatgtatgtttaagatattccaaagtgctgttttggttatcattgtgttttgcaaattttatcttgtatcttgggtattctaagtttctgggctaatatccacttattagtgagtacatatcatgtgagttgttttgtgattgggttacctcactcaggatgatgccctccaggtccatccatttgcctagaaatttcataaattcattctttttaatagctgagtagtactccattgtgtaaatgtaccacattttctgtatccattcctttgttgagggacatctgggttctttccagcttctggctatcataaggctgctatgaacatagtggaacatgtgttcttaccagttggaacatcttctggatatatgcccaggagtggtatttctggatcctccagtagtactatgtccaattttctgaggaactgccagactgatttccagagtggttgtacaagcttgcaatcccaccagcaatggaggtgttttcctttttctccacatccttgccagcatctgctgtcacctgaatttttgatcttagccattctgactggtgtgaggtggaatctcagggttactttgatttccatttccctgatgattaaggatgttgaacattttttcaggtgcttctcagccattcggtattcctcagatgagaattctttgtttagctctgagccgcattttttaatggggttatttgattttctggagtccaccttcttgagttctttatatatattggatattagtctcctatctgatttaggattggtaaagctcctttcccaatctgttggtggcctttttgtcttattgtcagtgtcttttgccttacagaagctttgcaattttctgaggtcccatttgtcgattcttgatcttacagcacaagccattgctgttctattcaggaatttttcccctgtgcccatatcttagaggttttccccactttctcctctataagatccagtgtctctggttttatgtggagttccttgatccacttagatttgaccttagtacaaggagataggaatggatcaattcgcattcttctacatgataaccgctaattgtgctagcaccatttgttgtaaatgctgtgttttttccactggatggttttagctcccttgtcaaagatcaagtgaccataggtgtgtgggttcatttctcggtcttcaattgtattacattggtctacttttctgtcgttataccagtaccatgccatttttatcacaattgctctgtagtacagctttaggtcaggcatggtgattccaccagaggttcttttatccttgagaagagtttttgctatcctaggttttttgttattccagatgaatttgcaaattgccctttctaattcgttgaagaattgagttggaattttgatggggattgcattgaatctgtaaattgcttttggcaagatagccatttttactatattgatcctgccaatccatgagcatgggagatctttccatcttctgatatcttctttaatttctttcttcagagacatgaagttcttatcatacagatctttcacttccttagttagagtcacgccaaggtattttatattatttgtgactattgagaagggtgttgtttccctaatttctttctcagcctgtttatcctttgtgtagagaaagtccattgacttgtttgagttaattttatatccagctacatcactgaagctgtttatcaggtttaggagttctttggtggaatttttagggtcacttatatatactgtcataacatctgcagtttagacatggatagaaaaggcctcagagagcagcagggttgaaacgtttgctgagtttatttatgtatgtatctgtttaaccaattcaatattctatttctggagatggtgggagaatgtttgtgtattgaattcagaaccacctgcgggtctgagtcaaaggagataattgctatgctccatgtgggcgatagattccagaagattcccactggactcttaagttaattgtatttctgatcatcctatctagcggttattcagtggtattaatcatttacaaagaggcaggtagaacccagtagaaaccactgttgtcctttgacagagttacttacatagttaaactggaggcttagatttcagaagatgcctatgatctgattagtggtccctctctgtgcctaaaccgtttagtcaaataatatgattcatgtaagcagtgtgattattttattttgtggaattttgctataggccaatcagaaaatgcctacatgagtttcacagacactgaatccctggtgacattcatgactgacaacatctcacattcactttccacagctcttgctggaggagctagagaggaggctgggtgctctggtctagcttgcccagactctcccacatacaactcgctttgctaggcttgctttgtgtgttcaggcgtcagtaggtcatgatattgactgtaactctgtgctatcttgtgacttctagtcagccatccaaactaaggatcatcttgaggaccaacaatgcagcaccttttataacaattaatatgaaatctgtattctcagagtcccccagatctgcagatacattggtaattttattggaaccattttctattaaaaaaaatgatgaagcccacagacattaaattttatgagtataagaaaatgagccatttaaaaattggtaggtatatttgtacatgaggctgtcaagagaatttcatttccttggagcttaaaataaatgttacattagcacttacggctacattaagcatggctgagattgggaattatttctgaatattttcttcaccttcaagatagcaggaacatatttccctccagagtagctacttaaataagaagagtgagaggttttatttgctatttttttgtacagagtctgaggagttgctctgttgaagtgtggcacggaaagcattggttggctccattggcctccaatacagttcctcctaatggctatggagtctctgagggagaggcccagtgtctgctgcccaggagcccacagactagagatcatcacagattcaggaaagtgctatgacagaatgcacacaggtttaaaagaaccccagggggatgaggaccagtttgtctcgggagaggcatcaaggggagtctagaagggtgacagtcacatagggataaggatttcatttcaaagaaaggattgagagtaagtcaagatctttgtgagttacctattttatttcattatagatgaaaaaaaaaacagattaagaaaatgaagtgattaactcaagtttccttagcacttgagtgtcaaagcttccacaggtttctaagttctttgaatcctgtgctgtccgtacttccactgatgcagattaaaagtcttgcggtaaaggtgggatcctgtggatccttcctctttccacattaacacgttcatctatattgcccgtcctctggttttgttgtgcagtcatttccaggatagactaaagatatttttaaaaaagccttttgagtaaggttataaaatttgatgcttgactgtgttccactttaaataagaagaaaaactgacagcatgagctcacatgtgattcagccattgatttcagtgtgttgcacactgtacttcagaaacaatgaacagaaaactccaagcaagcaggcaagcaagcaagcaatc

SEQ ID NO: 1127 - DNA, 1946 bp, Mus musculus
aatcaagtttcttactgggaaatgcccaaattgtggactggcctgtagtttatagtaatgacggtttttgtaaactctctggatatcatcgagctgacgtcatgcagaaaagcagcacctgcagttttatgtatggagaactgaccgacaagaagaccattgagaaagtcaggcagacttttgacaactacgagtcaaactgttttgaagttcttctgtacaaaaaaaaccgtacccctgtttggttttacatgcaaatcgcaccaataagaaatgaacacgagaaggtggtcttgttcctgtgtacattcaaggacattacactgttcaaacagcctatagaggatgactcaacgaaaggttggacgaagtttgcccgattgacacgggctttgacaaatagccgaagtgttttacagcagcttacaccaatgaataaaacagagacagtccacaagcattcaagactagctgaagtgcttcagctgggatcagacatccttcctcagtacaaacaagaagcgccaaagacgccaccacatatcatcttacactattgtgcttttaaaactacttgggattgggtgattttaattcttaccttctacaccgccatcatggttccttacaatgtttctttcaaaacaaagcagaacaatatcgcctggctggtgctggacagtgtggtggacgtgatttttctggtggacattgttttaaattttcacacgacttttgtggggccgggtggagaggtcatttctgacccgaagcttataaggatgaactatctgaaaacttggtttgtgattgatctgctgtcttgtttaccttatgacatcatcaatgcctttgaaaatgtggatgagggaatcagcagtctcttcagctctttaaaggtggtgcgccttttacgcctgggccgtgttgctaggaaactggaccattacctggaatatggagcagcggtccttgtgctcctggtatgtgtgtttggactggtggctcactggctggcttgcatctggtacagcattggagactatgaggtcattgatgaagtcaccaacaccattcaaatagacagctggctctaccagttggccttgagcattgggaccccatatcgctacaatacgagtgcagggatctgggaaggaggacccagcaaggactccctgtatgtgtcctccctctacttcaccatgacgagccttacaaccataggatttggaaacatagctccgaccacagacgtggagaagatgttctcagtggccatgatgatggtcggctctcttctttatgcaactatttttggaaatgttaccacaattttccagcaaatgtatgccaacaccaaccgttaccatgagatgctgaataatgttcgagatttcctgaaattatatcaggtcccaaaaggccttagtgaacgagtgatggattatattgtctcaacatggtcaatgtcaaaaggcatcgacacagagaaggtcctctccatctgtcccaaggacatgagagctgacatctgtgttcatctgaaccggaaggtttttaatgaacatcctgcattccgattggccagcgatggatgtctgcgtgccttggcagtggagttccaaaccattcactgtgctcctggggacctgatttaccatgctggagagagtgtggatgccctctgctttgtggtgtccgggtccttggaagttatccaggatgaggaggtggtggccattttagggaaaggtgacgtgtttggagacatcttctggaaggaaaccacccttgctcatgcgtgtgccaatgtccgggccctgacttactgtgatctgcacatcatcaagcgagaagccttgctcaaggtccttgacttctatacagcatttgcaaactcattttccaggaacctcactctcacttgcaatctaaggaagcgg

SEQ ID NO: 1128 - protein, 648 aa, Mus musculus
SSFLLGNAQIVDWPVVYSNDGFCKLSGYHRADVMQKSSTCSFMYGELTDKKTIEKVRQTFDNYESNCFEVLLYKKNRTPVWFYMQIAPIRNEHEKVVLFLCTFKDITLFKQPIEDDSTKGWTKFARLTRALTNSRSVLQQLTPMNKTETVHKHSRLAEVLQLGSDILPQYKQEAPKTPPHIILHYCAFKTTWDWVILILTFYTAIMVPYNVSFKTKQNNIAWLVLDSVVDVIFLVDIVLNFHTTFVGPGGEVISDPKLIRMNYLKTWFVIDLLSCLPYDIINAFENVDEGISSLFSSLKVVRLLRLGRVARKLDHYLEYGAAVLVLLVCVFGLVAHWLACIWYSIGDYEVIDEVTNTIQIDSWLYQLALSIGTPYRYNTSAGIWEGGPSKDSLYVSSLYFTMTSLTTIGFGNIAPTTDVEKMFSVAMMMVGSLLYATIFGNVTTIFQQMYANTNRYHEMLNNVRDFLKLYQVPKGLSERVMDYIVSTWSMSKGIDTEKVLSICPKDMRADICVHLNRKVFNEHPAFRLASDGCLRALAVEFQTIHCAPGDLIYHAGESVDALCFVVSGSLEVIQDEEVVAILGKGDVFGDIFWKETTLAHACANVRALTYCDLHIIKREALLKVLDFYTAFANSFSRNLTLTCNLRKR

SEQ ID NO: 1129 - DNA, 357652 bp, Homo sapiens
  misc_feature (1)...(357652): n = A,T,C or G
ccgcacccattcttggtgcagatactagcatgtagacatgtgatcctggtagggcaaatcaagggcttcctctggactgatatttggatgttagggagagagaaatttatctttgcactgggattgctaaactttgaagtggcaaattgcacagtgacgtgagggtaaaggtttaacaggtggctctcaagagaaaaacatgcatgtatatatatatatgtacgcatatatatatacatacacacacatatatacatatttaaatttattataaattctactgataaaaggatatgtagcacataattttcaaatactattaaaatagtcatctctctttttgcaaattccatgtgacctactcattctcacaggatactttcaccggtttttgcctcactcttgcatctgtagccaacctatggttacaattgatgataaggtagttccaacaggaacattggttggtattttcctttatcttaatgatgaaaatggaacaatgaagatatattctaaaaatttatacatttgtcaatgttgtgtgtgacttctttgttaaatttgatagttaaaaaatcttttttaaaatgacagctaacattgtatatttttgtggtgtacaacatgttttgaagtacatatacattgtgggatgattaaatctggctaattaacaagtgcattacctcacatagttgtcatttctgtggtaagaacacttaacatccattcactttacatttttcaagactacaatatatcaccattaactatagtcacattgctgtacaatgagatcccttgaagtttatttctcttatctaattgtaattatgtgtcatttgatagtagttttttaatattagaagaatatttcctaaaatttttatttttcacaatgttgctatggtttaaatatttgtgtctccaaatttacatctgaggtttgtgttattttccttggagatccacagctctccctgcattgtggcaggagaaggtcctccttactcttcttctccaacttgtcttccttcccttagcacaggggaatttttttctcatttagggtggatgtggagcatatgagacagctggttcttagatattttcaaaatcttttgggtgacagtgtagtgcaatggtgaaatagatggctaagcatttgggctttgaagacagagtacctgaggacataatcctgactccatcacatactacctttgtgaccttgtgccagttactgaacttctctgtttctcagtttctttttggttcaatgaggataatgtaaatacctactatggtgcctggtgtatagatgcataataaatatttgttgaattgaattaaattcaattttgctctattaaaattaaatgagattaaatgagaccattcgtgtaaagtatttagaacagtgactaacaccgggtaagaatgtatagagcctttattataacacttttctcattgtatttctgttctaatgcttagacttgaaattcaaaagccaggaagaggtgagctgtggtgaggaatgatgatacaatgaaagcaagagggtgacagtaaatatggggcttgggaataatttaatatttcaaaaatatcagcttcttgtatataggggtctcttaagtagttttttcaatcctggacttttctctccctaaagcatcttcaatcagaaactgattttttctcctcaaataccatgtcacatatttactcaaaatatgtctttcattgcctacagaataaagtccaaaccccttaagttggcctgatgagcccctaactgcctccaattctatcttccatttaaaggttcattttgtctactgttagtcacatatcacaagctttcttatcattatgattttccttttttctagttctgtcagctagaaagctccctccttcttcccaccaagcacacccattaagggaaaaaatagaggctgaaatccagcccacaaatatctcatcaatcggtgtgctgtgacttggccctatgactggccagaagggacttcttttcctaattctcacgaagatgccaaaagcactagtggcagttctggtgaagagatacataagatttcaactgtatttgcaatcttttcttttttattattattatttttgtcttaacaacattgagatgcaaagagtgaggtacaatgttgcaacagaggaagcatagagtggtattagaagaacttacaggaaggaagggctgtttaccaggtcatggagagtcaaagaaggcctcttgaaggcaatgacatctcatatagtgtctgaagtaaggtggctagtggctagtgatgcaggacattggtggaggaagaaagagacagcatagtaagcacaaggaatacaaagggacatagggagggaggaagtatgaaggtggagggttggaatggggaatgatgagagttgatcctggatagataagcaggagtcagatagggaaggatataaaaaggccaggtaagggctttgagctttcacctgggggcaaagagacttagaagtgtttacacagggaaatgacataacagatttatgcattagaaagatcactttagctatagtgcagggggaaaaatgaactgtggtggagcttggagaagaaaatagagaggactatgtatggccggaaaacacaggaagaagggagaccagttggaaggctgatgtggaaatccaagtaaaaaatgacggggcctgacctggagcagagccaacagagagagtgagaggtggatagtttaaagagatatctgggaggttgaatgaataggactggatgtggagtcgggggtagagaagtgttgatgttactaacttggataactgggtggatagaggtagctcctgagataagaaacactggagggggagagagtttgggcaggctgcaagatgattcatttgttttgaatatgttagagattcccgtggaattgccagtcagtccatgggtatgggtatctacagttgcaggaaaaagatctgtgttttggaattcagatatttgtggatttctatgtatttgtatctgtctcactggggttaggggcagcaatctctgttttcaaacacatgaatatctgtgcagcaagacatggtcaatatccacagcagatgggataaaaaaaagagtacaaatagccacctaacagttcaggtcaggttttattggcaaatgagtttgtaaaaaatttatgaaaaaaacccgtaggatatcagagttttctatttcagaaagctggatgcaagattctccacctgtactatctcatttaattcttacatcaaccatatgtggtaggcattattaattttttttacagaaaaaaaaccctgaggcacagataggttaatgaaaatgcatgctgagattacagcatcagtattcaaaacaagtcagtctaaggtaggagaatgtttcaagaagaaaggattagtaataggctcaaacgtcataggtgggtaaagtagattagcaatgaaattgcctcactggatttcgcaatttaaaaattacctttggggaggcaacttcaggaaaacagttgaaaggaggccaatttgttgggggttaaggagtgaataggaggcaagaaagtggagacacctatcacagacttctcagaagattgaccatgaagagataggagagacagagccaaatcttgagggaaataacaagttaagaaagcatttttaaagcatgttaaatgtcaaagtgagaaatgaggggacagtcagcaaaatgaggtctccagaggcccaaatgaataggatccagatcagtgatggagggatggtgagagaaattgctttctatttgtttggaagaaagaagaaaaggaagagagagcaatggcaggaagtctaagaattgacatcatgacctgttttctacgagtgatcttctgagactgggaggtgaaaaagtgatgactgaggtgtgaaaagagacaagatgctttgagaaagctacagcagataatggaaaatgcagctgatcaggatgtacagaaggattgggctgtattgagaaggtcaagttgagttaggaggccttcaatttatggtgcattagtctgggaggttttgtggttctcttctgggctgctcagcagatacaagtacacagaaactcacagctgcatgtaatagagcctttgtgggagaggtgaaactgaaggtatgatccttgggagctgaggattttcatacagtattgaaaccccagagattcccataggatgcagccttgttctaggtcagtggttctaaaccttgatacatatagaaatcacggccgcgtgcagtggctcatgcctgtaatgccagcactttgggaggccgaggcgggctgatcatgaggtcaagagatcaagaccatcctggccaacatggtgaaaccccaattgtactaaaaatacaaaaattagctgggtttggtggtgggcacctatagtcccagctacttgggaggctgaggcaggagaattgcttgaacccaagaggcggaagttgcagtgagccgagattgcaccactgcactccagcctggtgacagaacaagactccatttaaaaaaaaaaaaagaagaagaaaaaaagaaatcacctggggaactttaaaaaaaaatagtaatgcctgtgtctcatcctttggaattttgatttacttggtctgggctgtggctttgggattcttacaaagtctccaggtgactgtaatgtgcagtcaggatggagaattattgttcctctgatctcctgttcccaaagcaagttaataacctgtaccagccaggatagatagactaggttatggcacagtaacaaatagtgctggattgtcagtatcttgacacaacaaaggtttatttcctgcttatataatgtctactgaggtctaggtaacacttttgggcaggtgttctccttgtatttcttggcattccctagtcactgaggcaggggaagaggaagatgagaaaataagtcctggttcttagatgctcacttggaagtaacaccctttccctccattcctatttcattgaccagcattagttgcatagccacactgatttcaaggagcaggaaaaggcaactggatattggtgaaccttagtagtgaccactatctagagccttcactgtaaatgaaagttgaaggggaggaaaaggctcatgtatttactttcaaacacttacatagtgcttattacctgtcagatattgtctgcattgctttcaagtaggaactaacttaatctccatatcagcactattaaataggtaattattatccccattttatagaaagggatgttgtgcttaaataacctgccctgggtcatatagctagtaagtgggagaggcaagattaaattctaggtagtctgggtccacagtccaagcactaggtctctctagtctgctttctctcaacttcgatcctgagttggggggagcagaaaggaggaaaggtagaagatatgggtgtaaatgtgagatttggtgcatgcaaagaaatttagtgatgtttgtatgcttcactgctagagctgggatagggctttgtggaaaggcacgcagtgaagtttagggagttaaaaatggaatggagtgatgctgctgctagtgaggccaaccttggaggccatgatagggaatcacttttgcccctttccttttttccttcttcccatccctccatcagagccacccatttagcatctacatacaggttgtaacttggagctgtactgaggtttgctcagaaacagaaagcaggaaacaggataaaaatttcccgagaaagtagtgcttggatcatttgcacaaaagggatcaaagagtaagtccaactgtacctatttgtaatgcatttttgaaaatttacatataattacagctactgtcaagtaaactatattagaaaatcttcagaggaggggtatttgataaaagagtccttcagtgaatcagtagtaattccaaatcatcacttcctacatcagttttctaagccttctcgtttatattggtttcggttagactagaacacacctgcagttcactcagccagcttccattctgctgtgatttaggagtcagtgaacacttctggggattggaattcttggttatcacagacaaggtctaattaccatacctggagggacagaagaaaagaacaaatgattctgttttaaaatggacttttgacaatataacaaaacgaagctttgtctttgtgtgacattgaagctttctaattcctatctctctcatctgttaaatcttgaggtttgttccccacatacggagtctgtaacacacttttaaaatgctgtattagcaccttgttgcaactggccagcatattccttagggccagtcaatctatatgatgctgctactctattttccttgactctattttgattgggaacagttgcaagttgttgccaagggtttctcttctttcatgggctgcaaaatcatcgatggcaatagagatccttgatgttgctggttgttaccacactagcctaagattaggttattttctattatttacaaggagctctggctacagggtcaggagacctgattttagtctcagtgcagactgttctaaagcactgtgtcatctgggacaggatatttcatctctctgggtcttggtttcttcctttataaaatgaaaatttaaactagaagattaagaaaagtgtgtaaccttttgacactacacagctacattttttatgatcattaaaataatccaaacgttataatgctatggagttattagaaacaaagaagaaaggataaatgtcatttaattgaatctgcagatgggaataagaaagttctaccagtaattttgtgattgtgtcttaatggagtccaaaagaatttcctctttgggaaatgtgagttaatacacccacagaggaatgattaggaacaagaatatatatactagatgggaaatgctgagaacctgagattttaaatcaatacccataggcgagatgtgggcagctgacgatgtgcaaaagaacatatagatttgaaatattctctgttaatgatgatggaattattatagcatgctagaagtctagaatagcaatcaatgaattatacatgtttaaaaaataagtctgtctattcaccaacccagccaatgaatgactgattagtttaggatcatttgaacacaggtcacaaaagaatcgctagagtgggaaattcaattatgtgtttaaggctgctgtggtgatggtggtttcagttcttcccaccaactgcagggagggagttgtaacctggccgtatctcttgagtgctgctgtggcaagctcactacggatccaatctgcacctgagtctcttgttatttaactaaacacacctgatgtatttaaaagacattttaactgtaaggggataagctccatggccagcagcacttcctgtggaaagctagaatagcctagtgttattccaccgagtctcttgatttttttttttttttttttgcataaagatttttagcggaataaaattgcctcgtgtcaaccttctgggtttgctcagctgcctggtctctgaaaatttcagagagggaaaaaatgaccccaaggtaaaggctggatcctggttttgcatttagctgcttcaagcagtaggcttacccagttggggagaggagagaaagggagagagaggtggggggagagagagaggtgggaagagagagaaaggggagtacgagacagtgccagagagatggcgtggatgacactgtatctctgcctttctctctctacgtgtacgtatatatacagatatacatgttcctctgattactcactacctagattattcttggctcatggtcaatgatacgtgatcaaaaaatatctattgaatgcatttacnnnnnnnnnnnnnnnnnnnnggaggcaaggagggagagagagagagacagagacagacagagagagagagatcctgtcttgaggtcagtgattagtaatctagggggttccaaaaggggacaggtgctgagatgtgtacttccacccctgcctggggattctccctgcttctggtaatctgaccttgataatttctaacgcaattacctctcctctagcacattctgaccccagcaaaaggggacgcacccatccaactatcttttcgccttcaacactgaagacttcgctctaccaccaaccgctgacgccgcggcagtgcacttttggtcccccactctttgaccctgtttgcacaatcgtcctttctcgacaggcccaggtgcagcccccagagaaaagaggaagccttacatgtatcatatttacctggagggcttgtttaaacagatgagtcaacccaatcctcagagttcctggttccctaactctggggtagaatccactaatttgcattataaacaagttcttaggtggtgcagatgcggatgctgcccgtccaggccactttgagaaccactgccttagatcaaggaaggtgcctcagtgcgggctcctctttcctttccatctctctccacccctttcgcatttatgccattttcctttctctgtgacacattcaggcttttggactgtttgtaacggtgccgctgctgtccgttctcaacgcctggaaattggggggtttgttagaggtgattcgtgccctgccccaccctggcgcatcttcgcccccacagcctttaccgtttttccatcgctaacactgccctcctcactccccctctctcgggtgtgaattattcaccctcttcccctactcttcacatcaagtgcaacctttcccgcaactttgcagcggtggcgggctcgcggatcgcctcctgcgctcagcggtcctgggggaaactcccctgggcggccgcacgctcccccagacgccaagcccggcccgggtcgcaggggccattccgggcgccggctgtgcgctcggacttcagggctcgcgctcccgctccggggtggggtaagggcggtgcggaaagcgccagtgttcaggaaggtttcaggcgccggagcccggaggggggcggtagcagcgtcaggtggctgctctgcgtccccgcgcgccgcccagccagtccctgccctgctctcagcctcggctggggctggagctggagcctgcccgcacctccgccccgggagccgcgtccgcgccagcagcccggattcgggacccgagcgggagacgccgagatgtgagcctccgactggccactgctctctctggcaccctcttctcccattccaccggcccgattggacagcgatcgcttgcctcgatctccggggagaggagcaaccaccaggcgcacagcccagaagttgggctacgctgttcagcccggagctcgctgcgcgagggggtggacgaggagaccgggagacgaaggcgcggggaaggggtctcggtctgagctgagggggattgggagggtgggggcttgagttcccgcttgcgctccccagcagggggagagatgcagagcccgcgcccaggcgccggccgccgcggtagcagcctcagcagcagcctcagcatcagcaccggcgggacagcgacagcgggggcggcgcaggcgcactgtgccccgcggagcctgcagttcccgagccccgtgtgcggcaccgccacagtctgggcagcggcggccgggggagcgctactaccatgaactgcctggtcctcctccccagagctgctcatccgggtcgggctggagacacagtcaggggaccccgtcgccgccgccgcgccccctcttctttcggctcaatcttctcttccaccttttcctcctcttcctccaccttctttgcctgcatccccccctcccccgccgcggatcctggccgctgctctccagacccaggatgccggggggcaagagagggctggtggcaccgcagaacacatttttggagaacatcgtcaggcgctccagtggtaaggagagttgtagttcagaacacccccacctccatcccgcccacacgcgccccccatcctccccatcccatccctctcccaaggggggaggaggatgcaggcagccttacctggtggtttcatttaccagttgggctggatttggggtggggtggggtggcaatgagatggtgggggaaagttagttgcatccccttcctaccagacagactcaccccctcccacctgtccagagcccagaactggaggaaagaaaggggttggatagggtgtaggtacatctggaacatagagttgagttttgcttttatctttcttgttcttccttctcccacatttttccccaaagtgagcagcagggactgaccaaattctgagttaatctcagtggaaaggtttccctcaagttgggaatggctgcgaaagtggctacttaacaagatttaaatctctggaaaggcttttggccctcgtggtcacggggaaaggtgctttgtgccggggagagtagttgaggttgaacctaagaaagagttcagtgcttgcaaaatgggaagccaattactgtggacaaattggtgcttcaagtttcttcttgctatgtttttcactgtacattcatctatatatttcgtttgacttaaacatgagaaacgtagaagtgaagcagtaactattgtgcttttaatgcaactagaaaaaaatcaaaaagatgccatcctaccttgctactggcgttaaagttttcttgccttagtgtgtctttaaaataccatccatttatacattcatttcctacaagatattttggatgggaatggttatatatttccacattttaagaccttataaactttgcatcttactgaaatctgcgttttctacttgtttttaattcttttgtataattttaaacttcataagtaagatatgttgaatatctttttaagtttttccttcagaggctgttattttgacatctcttgcttggagaataatgagaaagacatttctgtatatggagtacagtagagcttggaacaaagcaatggaaatactctatgcagttccatagtgccttgtttattcattcattgaaacaatatttatttgggtgccttataccacagatactctgtggtttcttgggattaaaaaaaagtaattaatacacatcccctcttcttaagaggctccttgcctagttggaggcacagggaaagacagaggtacactgaaatatcaaataattaaataaataatgctttccctaaatggtagattagattatactaattcttagattagaatctcttttaagactaggcttgtaaatatttcctctgattttgagactaactgtatttaagtgtttcaaagtattttccccaaatatctgacttgttatttgtttttaatttgaggttttaaactttatttcttcgttttggccaatgcctgaaacaataaaagtctaaagcagtagtgttgtatttgggtcggaaaaaatagcgaatagggtctggcctaatattcttttaaatacctgtatattttttagttatataaattcataatggtaggcaatttttattcttatagattaccttcttgtattaagattatactaaacctataatacaaggggatattactcttaaaacagtttggggaaaatgtgtggattattggaattagttaagtatacaagtcttctttcagctttctcatcctcttgggttatttcaacttcacgcaatttggtctatgagagaacttttcagagaaggccttaaaacataaaatctgcagggttacgattgctctgctttataaagagaaagaacatgagaatcccttgactaaactttattaatatagcaactgtggttgaagcttcttatgcagactatgaaactatgagatagttttttgaatttttaaaaattgtagatatactatgaaataaagatttaccttaggtggcttagaaatgtctgtttctgttgcctccattttgtatctaccactcaaattaatgagtattttatcttttttacacttcatgttcataatcgtttcattggttaaatgtttctttcctggacaataccaagtgaaaatgaaaatttatctgttttggcacttaaatgccacctctaatcgcctatggctaactttgaataccactactcaaagaccctgaactgtttgaagtgtgttagatagttgtagtgagtatatatgcaggtgtgtgtgataaatactgaaaagtctcagtacctcttttataggcagaacctcagaaattgagaattatggtattaaattggtctacacattcacgggggaatatcccgcagttgtcatttctatatgatttggcagagaaatagaaaaatttatcctgagaaattgtttaattgagactaatagaaaattcccttcaggattctcacagatggatcaggtttgtcactttgaaggtttcattattcactaacttaacaacattgaaagtgaagtgttggcagaggtttagcaggaagagaaagaatagcacccagcactcccaatctatttaacaattgaagaaacagaggctggccttgtctttttacctgaaccccaagaaaagctctttctgatacaataccattttcttcttatgaaaaggtcagatcttacagtgagagtcagccaaacatagacatagatatagagagatacccagataatacacagtcacataggtaaacactcagctggtcaggcatccacccagaaaactgaaaagaggaatatcctacttcttcttttttaggatttgtctgtaaagtgtgtccaccaccctacagacagagaggaagcaatctaactctttttctctgtcttgcacacaaggagcaaaacagagatgtaggaaacaaaacaaaacaaaacacacagagcagagagaaaggggtggggtgggagagagagagagagagattatgggacatgcaagggaaatggacacaaagagaaaatgtcagacatttatttgtccatgggtatcaccaatgaactgaaatctcagccagttacaaatttaccagaacatttttttgatgatgtgaaacaaaaaagcaagaagtgtggcatatttgaatatcaattttatacctgaggatttcttaataaagttccaaactcctcagatgcagtttcccagaataccagcactgtattctgtactccagagtggcaactataacctatgctattatttcacacctcttgagactggatttttattttccttatttagttgactcagtctgttataagcgagcattgcaagttgttactggtgattcaaagtctataaaataaaataatgagggccattgagtaggatggatacacacaccctttatagccaaatctcaaaagaagcaaggaattctttttagtttaaagataaaagataagatcatttctagacaaaaggaattataataattcttagcatgtgattctagtaaatatagagaacattattactctaagaagttgtaaagtttaaagtataaatgctataggacggcttagacaaacttttggctagtacgatcaaaataagccattagtaagggaaggtttagaggactatgtggtgagttcattacagctgagcaatgtctcccagaaggcccctgcctcaagggcttacagactagatttgtgtctagaacattattaggataccttcctttatttaaatttcaattatttatgcaaactattaatctaaattgggctctagggagcaataaacttgtgggtagaggttaagtatctggaagaaagtaactgtttttaggacttttaggttaaaatttagattcaaaagacaaaaaatatttcaaagaccttcaacctgattttgtctttgggcagcacattttactcatatgttgtcttcaattccttagcaaataggcagacatgattagtttgagtgacagtaagctaggttgctattttgaaaattttaactacaaattaataccttttaactagaaattattattatttaatattttaagctttatgacaaattggaagtttattttagttttgtggaaaactagaagtgtttttctttttggggaaaaaaggggttcaggaaagaagaaaacagagaaggtagtattttatgaaccacttacctttcaagagaagaaactcagtatcctcaatttttcattctgcttgagatagctggttgcacaagcactttttttactcagctatctcttacttgtagaaaagtccaaaattattttcatgctgaattgacatttgtacaaactgaggtcttaaaagaaacctataagagaggaagcagaactagtgatctgtaaacaaaacaaaaaaggaataataacttttacaattagccaatttaaaagaaataatggaaaacaaatggacattattttggttgttgttgttataaagttattgacattttttcttgaaaggttttctttaatatctaagacactattcaggaaatactgataaaaccacacagtgtttttgaagcactggtttactcaggtcttataatgtaccactttaacatttaaaatatcaaagaggttgaaattatactgaccacttcctaaattatatttatacataagccacaagattgtcccttgcattagattcccacactgtgttatataatgaatgcagcacattgctgatagagggatgcttattctaagatactgttatcttcactagaaattgccctctttgtttatcttttgcttgattccagaagtaggatgtgtaagacatccatctacctaggcaccttgtaactgacttactaaaaggatcatataaacattatttttaatagaagggcgtagttatgattattttaattgatagcgactgagtagatttcctaaagaagccctttagtttagtcagtgtttatctttttctttccttgtgagtcacagccgagtttcttagcttggaggaacaatgcttctgcattctccagagtgtagcctaggaaaaggttgtgctgttcaccaaagtactgtagttagtatttaccacaagaggtcactctgggttctgtcacaggtgaaccaagtagttaatatttttctctttttctgttctcccacctcccccttcccccaccttgcttgccaccccccaaatttgactgggagggagtcaatgtagttagttggtgctcttggaagaaaatatctaaaatgtaagacatgcaggaaagttaaatgaaaaaaggtatgtattatattaattattagaatttattttagttgacagtgatcaacattttataactacacgaaagtgatactgataaaaattgtttctgtaaagagatggatttaaatacattttagactaatagagcattttctttagcagataaaattttatggtaatacgcaatttcagcatttcatatacatacagtatatgaaatataaagtcttgcagaaaaatgacctgtacataatgcttcatattgagccacttcaacagattttttctctatgagacatctttatataatttatattgaattggtgaagtagaatcagttcataacagtgctttaattttatcaaaagatagtttacagatttatagttacttcctcaggatgttatgtaatcctagtattttatttttacccaaattttaaaaattaaatacagagctaaattgtttaaaattattaaataatattttcaaagttttttaaattattaaactccaaaagacaggattgggagtagactgttttaagaggttttgtttcctcttagtcagtaaatctgaattttggtttaaggcaattcttttttctttttggtgggttagaaaccatatagcaagagatactttgaaatgttccacacaattttggttttaatgggaaaaattgaaacatgtcttaaagtacttttataaatacaagagacgtgttgtgaatcagataaacatggataacaaatcacaatccaaaaccagtggcaattattgttgtggaaattgaggtcaaagaaagtagtgttctagaaagtattctagaaaatggacatttatgaaacaaattcctttaccaatagcaaagcagaatgtaaaaaaatcctcagcattttccactaaatagtctagctttataatacatgacatgagtccttttcatcatttaaagataattaaaaagaatcatttaaatattcctattttatataatatagaaactaatatattagaaaggctgagtcttgaaatatatttgatcaaatggaggcagtaataactattgtcacatagatcagtgtgtattttagacatcattttagtgtttggttatatgtggatactattacctagtaaagagacatatttatatacattctagatagtagttttgtgatatattaggttgacaaaagaaaaaagaggaaaattaatgagcacagtaatttagaaagaaagtgtggttagaaagctattggaaattttattgaaaatagatttccctctctctttgggtctggtcccattacagaaatataactattaagtacaaagtcatatggatctcaaaagatacgcaatttgagatctgagcttatgtgcataatcataacagcttgtagatataaggacatataattgggaagtcatgaaaattttggtatatgaactaagctccctgaggatatgggtcatatcttaaaaagacttttatgtcctccactgtgcagagcacatagcagtaagtattcgttgaataaatgcttttttgatttttgtctcctaaagtaaccaagaccataattaattctttccccaagccaatgctgattaaatctattaagtgagcttgaataagtaattacatagtttaaactatttagttaatcaatgcatatatctgaaaacagaaaccacactgcatagggcaaatcagatggtacttctgagaggatgagaaaggaatatgaaatggatcccatgttcacttcctattccaaattgaggtgcggctgaaatattttctaccatttttgtttcagttgtcaagagcttgaaagctggactatttaataccagaaagaactgcttaaaaatttgtagattctaactaaattattttaacaactttgcagttagcagttattgatggtgagttttatccctgggaatcaatccttacctgcttaagtaccttctgagtgagttttgccttggggagcagcttacagccctgtgcagtatgcagcagaagaggaaaatgagttttagatttttagagactgcagggccagcctcaggttgccatatctaactaaaaatcgaacaactcacttggattgaggggaaaagttaacctttgtcctgatcttttctgtaagccctttttggtctgctggcatttatttttattttttaaatttgggggaaaattaaagcacaatgattttatttttatacatttacaagcattgaaaaaatagaggagttcctcaatgggggttaaagagtctcagaataaagactccgaaatacaacgctgatccttttgcttggctctcatgccctttctagttaattatccattaatgcaacaccattttattgagtacctactatgtgctaggcagggatctagcactagggattcataatgaacacagtgacaaaaacaatgtttctcctgtttttctgtggagggcatgtgcatatttataagtttctagaggcctgtattagagtcctggctctgacacttactagctcggtgacttaacttacttgtacctagtttccttatctataaaatacaagtaataatagtacctagtttatggggttagagtgaggattaagttaggcagtacatgtaagtacggagaacggtgcctggcacataaataagcattatatcatgccagtagttattattatcatttagttgtttaaatatttgaatgcactttctatagttgatgtttttaattcttagtcaccatttccttctgcacctcttttcaactaatttccgcctcctccataatgctgaaaattcctagaaaattatgagtgcgcattcttctcgtaaatcttaagatcttttcttggtccatattttttctgactttgcaaggtttgaaactatattcccctaccctctccaccattcatcttatagctatcatgagcttacaagccctgctgccctttctactggcttccctttttgttcctctcctcctccctcctctccttttccttcctaaagaatgagttgagtagtcccacaagttctcccttcaactttctttcttgcatctccatcctacttttcagggaaagtttgtcttctgccataatttaaactttatcttctctgtgccccaggtctgtatttccaaaggtatacaggatttctcttcttgtactactcaaaagtcatctaaaactcagtgtaggcagaatagaatttatttgcttttggcctcagattgacttttttttttttgtatctcccgtttctattcaaagtgtctttagtatttttgttttttactctagaagtgttagggtcatctttgactttccattcagtataatgttagtcttactttccaactagattatcagtccttagctttcttttgtgtctcctgtaagtgctgtgtgcagagtaagttaattcatgcccatttactatactgactcatcttaagacatgaagcatgttcataactgacatcatatacagccagtgtctctaactgtgatggaccaaagaaagaactacaggtcagaaggaaagagctgcctcattaactgacctcagaaactaaaggtctccaagagggaggaatgacatgtgtgacatattccccttgctcgttcctaaaacagcttctgtctgtactagagcaaacatcatcaaggtaactggtaatctttctggaactctatgagggcatttccaaggctcacagagcagtgctctcaactgtgctatcaggcacagtgctgggatggaaagagcaaaggtgttgagttcttgacaacacagactcctgtctagcccttactcctggtgacacactgaggctctccagaattaggacacctaccttacagggttgctcagaagatttggtgaagccccagatgtagtggatcatctcagtaaggacttactctagataaggtaaggtaggggagattttttttaacctgaagaaagcaagaaattaagtagttgagaatttcccagcagaaactggtggatctgagcttaaaagcatttgagttcaatttactaagggcttaccttggagagaatactaaacccaaacaaacaacacacctctgtccatcctcgccccaaacaaaaacctactgcctagagcaaaagaagtatcagttctgcttacttcaatacctgataattcttggacaaactgaggaataaagcagaaacatcagcctcttcttataaccatcctagtgaaatcctgccaaaggagaaatgaattgaatttgtagctctgtaactctttcttgaacaattagctcctgttacatagagtgtagaaatttaaaaacatacaggagaaagccttagaaaattaactggattgtgaatgcattcagaaaagcctctttgtgtttttctatcatgtgtgcaggttggaccagctttttaattgaagtttttcatcatttatcttgccattagtgtttaattgccattaaagggtaacttcaaagaaaatatataatctcctcagaaaagatgcagtccatttgcaaaaatctttatttgtaggatttaaaatgatgcttaaacattaaatatatacttttttcctcttataaatacatcttgactgatttagcttttattccccaagattatgtaactagcataagtcttatagcttcaggtattttaagaaatttcattgcaatataatttagtaaaatgttatcattatatcagggtgaaagttttctgttgtattatgatgttatgcatcaaataggccattattgcaattatattttgcttctaatgattctgaccagtttacattttagaaactcattttttcatgaacaaaacaccaactattaaaagtagaaacattgaattgttaaacattttgtggagaaatcttttttaatagcaaagttgctattattcctaccactagaatttcagaaatatatgttaaagtatctcatgcattttgaaccactgtagctggatgaaaaaatgaagttaatgccatcaaagaaacacagacacttaaaaaatgtacctttgatcgtgaaggagatagaaagtggaagcatatttttatctttcatgacacctgaacaagtttgaataaattaacagatatttttgcatatttcaaactcctacagtgatggtctgcttaatgttgccaatattattgggtaataattagtgtcattgtggaaggtacgaagtatgtctgcacatttgctatattgctagaggattgttgtaggatacaggtgtattttgtaagaacatgaaggagaccagccttacattctgtcattgacatagaaatgggcagtgcacatacaacaaatcaacattgtggatgtgggcatgattgtgcttttgtttagccatctgtaccaagattttatttaacccaaatacaattgctatatatgcttcagatttttccactattactgttctatgaaacttaaatagatctataggtatcattcatccagaagacacatttaaaaaataatacaggctgggtgccgtggctcatacctgtaatcccagcactttggaaggccgaggcaggcggatcacgaggtcaggagatcgagaccagcctgaccaacatggtaaaaccccgcctctactaaaatacaaaaaattagccgggtttggtggtgcatgcctgtagtcccagctactccggaggctgaggcaggggaatcacttgaacccagaaggtggagattgcagtgaactgagattgcgccactgcactccaacctggtgacagagcaagattctgtctcaaagcaaaaaacaaacaaacaaaaataatacagactgcatgatttaaattcacaagtttctagaggccattcaaagcgggggaatatctgcttagcaacacccaccccctccttttttttctttaacttattgccaattccttgaaaaaaaaaaatacctgccatggtccttatctaccttcttaacaatgtctaagaattgctttataactatttattgactgactgtatgactttaaataggaagcagaattttttatttgatatattcataaaacatttgtgagtgtacagtaatgaacaaatagacacggcccctgacctcatggaactcagagtctggtaggggaggcaggcgttcaccaagcctacatcaaatatataattacaaattgtggtaagcattttggatgaaaaggggagggtttgatgatcgtgtgcattgggatctaattccaattgggaggcctttctaaagaagtagtgttaaattgatacctacagtgagaggtaacaagaggataagtgggaagaagaatatttcaggcaaagagaaagcatgtgaacattcctaaggagaaaaagaaaatgaatggctaagtttgtgaagcttaaacactagcgcagctagattgccttgggtgaaaccagaagaaagacaggagataagggcgagtgacagttaggggcctggctgttcaggggaaagattttgtgttttattcctagtgcagtggaaaaacctcatagtcccaaaagctacttccgtaaaggttgaggggaggaggagaaagagtgggagaccagttaggtctggtcttgcggtagtcgacgcaagatatgatggtggtctggcctgggatggtagtagtggaaatggggagaaatggatgtatcagatatgttttgttggtagcattattaggatctagtaatggattggatgacatggatgaggtgtgaaggatgactcccaaggttttggcccaagcatttgcgtgcagatggaggtagggaagatatccttgagatgggaaaaactggaagaaggccacgcttggaatgaaactctaaagaccatctgcatcatcgctgtcatctagctcccttttcattcccttgaagaaaagaataatgcagccaaagacagcttagctcaatataagtgtgtacagatgtgatttctgcattccatttgcagagttcagaaaagatccgggtaattagcttggacagtctggtcattcttgtggattagaaacatgtagtttcagattttgataagaaactgatttggataagaaactaagtaaacttttgaataaaacccaaaccccaaactaaacctaactttataataaatatttgacaataagcattgttgaaaaggcctctgcagccaactccttttagaaaaagttagtgattgctacatggttttaatgggtcacttttgcttcagattttccttcataggcatcgatttttggaatgtgtgttctttgaatgggagcactgtgaagggtgggtcgatacttgaagctgcgactgcctgcactgattcttcctcactgaagccccagtgatctggaagagcagcttgaaatagcccttatctgggtttgtagtcttgcctgcacttcgtttctgttggaagagctgtgtgttccggggtttgagggctttgagagcgagagctgtggtttctgggtggtgtccttctccaaagttagaactacatgaatacagtcagagggaaaacgcagctgactttcttcacatgccgtcctggatcttggcaaatctataaattagtgaaagttttttttttttttttgtgaagtcctttttcttctcaactcctctccattttctttgttcctcagtactctaaaatttgtgtgtcttattattattacttaaaatacttaaaaactgctagtcctctgaaatatttctctctgggggtaatttgcataaaaaaggtaaaaaggagagggagccagaggcttaaccccctaaaaagctgttccaccctttttttctacacgtcttaaaaattgtatatatataaggcctgtaacattgtttttatatacatataaatagtgaaatgattatacagtccagcaaattaacctattcatcatcttccatatttacccttttgtatgtgtgtggtaagagctaaaatctctcttagcaaattttcaacatacaatacaatattagtaagtacaatattagtaactgtagtcctcatgttgtgcattagatccctagacttatttatcctacataactgccagcttgtatcctttgatttctcccatttccttcccctccccaccacccttgttaatgtacatgagatttctggatccgagaaggatatgattttcataaaaacaaaacaaaaaccagtccgatcatgttggagcagctcgaggaaatcattttttttctcctggaattgctatagaaagggaggaaacatcccacatgctcttatattgcctttattgactgaatataaccttcctttgtccagaattttttatcagccaggattattgatcccatgatttgtgtatgaactcctttaggaattaatatgtagtagtattaacctaagtgtagttattttcctgttgtctgaataaattgctctataaagaggaagtgcctccttatattaaaacaaaataaaacaaaaacttagcagttcagaaatatagtctgacagaatagaaagtcttagacagggaggcctggtcctgtctttttcccctactagatactcttttccccctactagatactcttttcctatattggatgagtctttaattttcctggtctgttttcccatccctaaaagaaaggaaaagcagaagatgggtgcattttggggtcacctgaggatcttgttaaaatgcaggttctaactcagaaggtctggggtgcgtcccaggttctgcattgccaataaactcccaggtgatgctggcccatactttgagtagcaaggcactggatcaaagtgtgccagacttggctgagcatgagacttacctctatgtctgtatttttacattcacctctgagggagtcagttcagagcatctgcattagaatttaacaatctctatttttgacactggtgacaagattctattgcagctgccagcatttaggaattattgctctagattagtgcttctccaccctggctgcacattaaaactacctgaaagacttaacaataagtattgatgcctgggttctactcaagaccaattaaaacagaatctttggcatttggggacggggatgaataactcctaggtggccccctccaatctccctcaactttcactccactcaactgtgcagtcaagattgagaaacactggtaataatctctaggggaccatttggaattaagggtctttgattcgtttttaaccttctaacccttgaagaaaaagtgcttgttttattttatgttctcctctgataggatactgcatagtcttgaatgaatataatgagttgttttcaagtcttagccccttgtggatgcattccagaatctgctgacttgtgaaattacagcttctgaaatccttgcctcctggtggggataatgccctggttcttaggcacctcattcaggaccatattgtgtgtctgatccctttggagatggaatgtttgtaaacatctttaaggaatgaaacaatctggatctcaaggaaagttcaattttccagaattcatggctcaaggtcctttaagagctgtgaggacaaaccagaactggtttccctgtcaagattggttgataagaatgggtgatggtcactgaaattctgggcaatttctttaaaggcatcacttttccaaaacttctaaaccctcttactttctagatttgtaactcatttgttttcaaggaagttattcctctgtaatcagatttcttttcctcaacatgttttaaagctaaaagaaattaaaattttctgggaagcaattttaattaatttgctattctgttcttaatatttattaataatatatttttcatttgttgtaataagaattttcatgactacagggaaatgcaacagttatatgaatatttcatatacatagagagtgtttcaatgaatagagaaatttcaaaaagaaacctctggattgttaatattcagcaatttctatctaatttagccttaattaaaaaatctgtctccctctcttcttctcatttttctcaagtattttattctgtagtttagttcttagtgataaatacaattttataggttttggtttgcaggtcaacatttaacagtttattttttctaggttcttctcttacatacatacatacatacatcccccccgccacaaacacaccaagatacctctgcatatacaactcagtaacttaatcttgtacataatagtaatagcttataaatgctttttgctttaatagtttataaagactgcttactttatttagtctccgtaactatccagaatggtgggtattactgtcaccagtttgtatatcaggcaaccagtagcctaattggaactcaccagcttttttgcagaaacttacttggtggtacggagaagggatccaagttctgggagaatatttgagtcagggctccttgtggtatattgattgttagaaatgtttaccacttgataacatctcatataaagtagacttagcaccatgtctgctttactcaactacggttttataaaacgttcagaaatggtaaaagcagttttcatgtttgtcctccataaactcagagtgcatatagttaaaatgcaattattaaggcctcgaggtaaggtctggtgagcacagtccaattacttaactctttgatggtctcaattactggacttaaacttcaagtataaagatgaatggagagcatatttcctagactacatttttaaaaactttaagttggtttgaaaaacgctctttgagttgttaggtctgaggtctaattgactatgtgagcaaatactttagggtatacctggcaaatatgtgaattgtccatattctatattattggttaaaatgtagatattttgaaaaatgggattgaagagaaaagcaaagtcttaattacctacttttgattctaacttctgtgttcttctccctaaacaactctgcttccagtctaacaggaagagttagttctccctgcagtgagttgctttaggacttttccttccttcctagtcttcctacttttccatctaaagcaaaaaaaagagacagaatttcctagactacttaggaagagtttaaatttgcaattatttcagccaagaattagaatttaaggaacatgtgttctagttgccacttctgaccttgggaatcgcggctttgtgagtctgtgacttattgcctgatgagtgatcagtgaaggaagaaatgaagttttcctgattagggataacatgtacaacatcaggcccaatacctagcatagagtaggagtccactaatggttgcttttgttattaattttgttactacacagagttactcaagtgtaagtgaaataacatattaacagatgggtagtgatagctggaccctgctgagctggagtctgaacgttcccattgtagagctgttgaaaatggtatgatgggggcagggtaatgtttttaatggcagagttcatatgaaatagttagaatgatccaaatcctaacaaatgtcttgaaaactagtctgtttataagagagagagagagagagaggtttgtaaagcctttgcagagttgtttaaagcatgcttttaaaattgtaaggtacaccccttcattgggctatgaaattgatttaacaggtcttgattaatgcagccaaaattgaaataggttagaaattgtagagtacctctcatgtagtgagtaaatgtagtctgagaaattttttcaattgtgtattgtgtatatacatgtctgcacatatgtatatacacttgagtcactatgtaaatattatttcttactatgagctttaataaaaaaagtttgaaaaacactatttgttagatcagccggcccttaatgtttacagtctttcttttttaagcctgtggggtcctttttcctagaatactagcaattcattcaaccaataaataattactatattgcaatacttttcttaaaaattttttaaaaaatcaacaagtaaaaattgaatatgtttatagtatacaataagactttgcctttctcttcaataccatttttcaaaatatctacattttaatcaataatatagaatatggacaattcaagtatttgccaggtatagtataccctaaagtatttgctcacatagtcaatcagacataacaactcagagtttttttttttttttcaaaccaacttgaagtttttaaaaagatagtctaggaaacataatgctttgatatatgtctacattgtggaatggctaagtcaagctatttcatatattcattacctcacttgtcacttttattttttgcagtgagaacacttaaaatctcccttggagattttcaaatatacaatatattgctatcaactgtcattaacctgatatatagtagatcactcaaacttattccttctgtctaactgaaatttttgtcccttgaccaacatctccccaatgtccccacccttcagcctttggtagccaccatttttctctgtttgactttttttacattgcacatgtaagtaagatcatatggtgtttttctatgtctgacttatttcgcttaaaataatgtcctccaggttcatccatgttgtcacaaatgacaatgctcctttctttttaaaggctgtataatatttcattaggcatatataccacattttcgttattcatctgttgattggcacttaggttgattccatatcttagctactgtaaatagtggagcaataaccatgagcatgcagatagctctttgacatgctgatttaatttcctttggatatttactgagtcgtggaatcgctgaatcatatggtggttctatttttaattttttgaggaacctccatactgttttctataatggttgtactaatttatattcctaccagcagtgtagaagagttcccatttcttggcatcttggtcagctgttatcttttgtctttttgataatagccattccagtaggtatgaggtaacatcttattgtggttttaatctgcatttccctgatgattagtgatgttaagctttctttcatgtaactgttagctctttgcatttcatcttttgaggaatgtctattcatatcctttgcccatgttttaatctggttatttgttttcttactatcaagttgagtttcttatatattttgcatattaaccccttatatgtttggtttgtagatatattttattactccatgggttgtctcttcactctgttgattgtttcctttgctgtacagctttttagtttgatgtaatttcatttggtaatttctgctttagttacctgtgctattgaagtcagacccaaaaaatctttgctcagaccaatgtcttgtagctttccttctatgttttcttccagcagttttatagtttcaggtttgatgttgaagtcttcaatccattttgagttaatttgtatatatggtgtgagatgagcgtctaattttattcttctgatgtgggatatccagttttcccaacatccttgattgaagagattgccctttcctcattgtatgtttttggtatctttgctgaaaatcaatggtttataaatgtgtggcttgatttctgggctctctattatgttttatttgtctttgtgtctatttttatgccagtaccgtgctgcttttgtactataactttgtagtagattttgatatctggtagtataatgactctggctttgttcttttcgttcaaaattactttggctattggggtcttttgtggttccagatgaactttaggattttttttttctgtttctgtgaaacatgtctttggggttttggttggaattacattgaatctgtggattgctttgggtagtatggacgttttaacaatattaattcttccagtccatgaacacaggatatatttccttttatttgtgtcttcctcagtttcttttatcaatgttttgcaatttccagtgtatagatctttcaccttcttggttaaatttattcctaagtactgttttttttttttgttactattgtaaatggtattgttttcttgattgcttatttggatagcttgttgttatagaactgtttttcatatgttgatttcatatcctacaactttactgaacttgtttattagttctaacagttttttggttgagtctttagtttttttctacatataagatcatattgtctgcaaacagagtcaatttaacctctttatttcctatttggaaggctttatttcctttctctttccagttgctctggctaggatttcagctagaaattgaacagaagtggtaagaacaggatccttgtcttgttcctgattttagaggaaaaactttcaactttttgtcattgagtatgatgttagagcttgttatggcctttattgtgttgaggtacattacttctaaacctaatatgttgagagtttttaatcatgaaacaatgttgaatttttcaaatgccttttctaaatctattgaatcaatattatagtttttgtccttcattctgctaatgtggtctatcatatttattgatttgcatatattgaacaatccttgcatctcaggaataaataccacttgatcatggtgaattatccttctatgtgttgttgaatttggtttgaaaatattttattgaggatttttgcatctatgttcttcagggatattggcagataattttctattttcgtagcttccttgtctggtatcagggtaatgctggcctcctaaaatgagtttgaaagttttctctcctttttaattttttggaagagtttgagaaagattgaattagtaagcagtgaaagtatcaggttctgggcttttctttgatgggagaatttttgttagtgattaatctccttatttgttattggtctattcagattttctttttcttcatgatttagtcttggtaggctctatgtgtctagaaatttatttcttcaagattagacagtttgttggattttaattgttcataatagttatgatcctttgtatttctgtggtatcagttgtattgtctcctctttgatttctgatttttttgagtcttctctctctttccttagtatagctaaaggtttgtcaattttgcttatcttttcaaaaaaccaacttgtagtttcactgaccttttaaagttgtttttctagtctctgtttcatttatttctgctcaaatctttattatttctttccttctactaactttgggcttagtttgttcttctttttctagttcactgagctataatattagttgattatttagggtcttcttttctcatgtaggcacttgttgctataaacttccctctaaaaacgatttttattgcttcccttaagttttggtatgttgtggttctgttttcatttgtctcaagatatatatatatatattttttgagatggagtctcactctattgcccaggctggagtgcagtggcatgatctcggttcactgcaacttctacctcccgggttcaagtgattctcctgccgcagcctcctgagtagctgcaactacaggcgtgtgccaccatgcccagctaatttttgtattttttagtagagacagggttttaccatattgggcaggctggtcttgaatgcctgacctcatgatttgcctggctcagcctcccaaagtgctgggatcacaggcatgagcaaccacgcccagcctgtctcaagatatttttaaatttccctttcaaatttcttccttgacccattggttccttaggagtatattgttcaatttccacatatttgtaaattttctaaaattcttcatattattaatttgtagctttataactttgtggtcagaaaagatactttatatgattttaattttcttaaatttgttaagacctactttgtggcctaagagttgatctatcctgcagaatattctgtgttgagaacttcaactttctgtacttgagaagaatatgtattttactgtctttgggtggaatgtttatatatctatatctgtcaggtccatttggtttaaagtgtagttcaagtccaatgtctcattattgattttctgtctggatgattatattgaaattcctgtatgcagactaggcatataatttataatcctgaggaatatgtgatttatatgaaaagacaaagttagcatatatggaatatttagaaagacattatttaataaattttataataccaattatataaaaagagaaccctgcaaaaatgtattagttcattggcttattcatataatcaaccattaaattagcatttactatgtgtcaggcactgtgctaggcaatgagaaatcaaatgtgagcaaaaacttacatgggctctatccctgtagagcttataatccaataggcagataaacattaattttttctttttttttttttgagatgtagtcttgctctgttgcccaggctgtagttcagtggcatgatcttggctcactgtaacctccacctcccatgttccagctattctcctgcctcagtctcccgggtagctgggactacaggtgtgcatcattatgcccggctaattttatatttttaggagagatggggtgtcaccatgttggctaggctggcctcgatctcctgacctcatgatccacctgcctctgcctcccaaagtgctgggattacaagtgtgagtcaccgtgcctggccagatatacattaattaagtcatgacacaaataggtgtaaaactgcacttgtgaatggctgtgaaggagaggtacatcatgtcaaaaaattatataacagggatataacctcatcagcagtcagggaaagattccctgaggtcatgtcaattgagttaagatctaaataaatgaaggtgacaaggtgaggagggaaaggaatggtatttaggcagagatgatggcaaataaaaagtccttatgctgggagagaacttggcttttacaagaatataagaaaagtcaatgaggctattgtaggcgagtatcgtgggcaagggtcagagtgatgagaactaaggctaggcagactttgaagtcattgtgggccatggaaaggatttgggtcttatgagagccaaaagaaggatgttaaaggagggaggaaacatgatacaattttagttttttgaaaaacaaacaaacaaacaaacaaacaaaaaactcgtttggcttcagtataaaaaatccattgaaggactcccacagaggttctgagtaaatcagacagttacctgagtagtctaggggagagatgatagagggctggagttgggtgatgatcatggagatgaagagaactagagagatttgaaagagttttaggagataaaagtaatgcgattggtaattaattagatacgagggtaatgggataaatgttgattgatggctcccagattactggctgataaaattgtatggatggtggccccattctctaagacaggaaacagtgggaaagtacctaatttgaaggagtaaaaagtcatgatcatgttatactgaagcacatttaagatagctaagaaaagaggtcaagtttggatatcaagatcgagagtttacagaagaggtttggtttggagatatacaatcatgagttactgaatctatggacatagataagcatataagagtaaagaaaggagaggacttaggcactctaatgtctacttattggtaaagaaggcactctaatgtatacttattggtaaagaatggtgagcctgcaaaaaaactagaggaatgttcagagaaacaagtgaatggtgttctgtgaaagccaagcattgagagacttttaagaggggagtggttaccaacgcttctgaattgttatgaaatgagtgaaaagcatcctgtgggcttggcgatagggagaggttattggtgacttggctgtcttggtggagtggtagggaagaagctaaataggagtgagttgagtgaacaggagctgaggagatggagtcagtgagaatagacaacttctgtggaaagtttgtcctgtgaatggttggagacagatacggtggcagccagaggagatgtaggctgagtggtattcagtgaatgtggcatagaaaatgtagagttgagatgattcttaagtgttttgatgggcaaagagatgtcagaaaagtatttcaagtgaatagtgggcagcatgaatgagcagattttcggaacataatgaagagactgacctaactgtaatagtatagactttaggaacaatgggaaacatgtttgtataggtagggaaggtgagactggatttcagagggctttgttagcctcggaaaggatttgagatttgattatataaacagttgggattgttgatctggatgaagaatgataggatacaggaagggtttcagggagacaatttagcattcacctaatcacaagactgaacattggaatgagttaaggcagggataccatgtagctgtatggcctgccacagttatctagtcatgaagtggacagcttatggattagagagggtaaactggcttgggctaaggcgagaaagaaaacaatttttgatggtcatattaaaaaatttatagttgatactataaataaaagaaaacatcatttatttatagaggaatttatactttctgaagtacttttgcagaaattagctcattttgatttctaactgccctaggtaccacagaaatgtagtaataccatcctcataactaaggttaagctcaagtaccattgttttactaaaacttctgattctctggtcagacggagttatccattgtcctctttgtgtgttttaaaaaatttttatgcagcaaaatgcccagatcttaactgcacagttcaatgaattttgacaattgtatacacctgtgtaacgtatacctctatcaagatagagaacaattacatttgccagaaagttctttttatcttttcggtcacttcctccaccattccctttagaaatcattgttctggtccctatcatcatataatattagttttccctatatttaagcttcatattaatgaaatcaaacagtatacctactttagtggctgttttataatgtttttgagtcatattgttgcatgtgtcagaagttttttgttccattttagagctgagtagtactccttgtgtaaatatggcacaatttctaatccattctcttcttaatagacatttgcattgtttccaatttttggctactgtgaataaatctgatgtgaacattttcctccaagtctttttgtaaacatatgttttcatttcacttgcataaatacctagaagtgaaatttctgggtcatagatacatatttaactttacaagaagctgttttccaaagtgatcataccattttacattcttgctagcattttataaggagcactagttcttgattctcatcaacaatgttgtattgctaatctttaaaactactctagtaattgagcagcagtatatcgttgtgctttcagttcatgtttcctgatgcatgatgattgtaagcatcttgttcttgtgctcattggctgttgtttctcttttctgtgtgtgaaatgtctgtttaagttacttgcttattttgatacttgggttgtttgttcttttgtaggaatattttgtattttctggataagagttctttctcagatacctgtatcaaaagtattttctcccaggctgtaggtttccatttcattttcttgagaatgtccttgaatgagtagttgacagtaattttgatgatgcctaatttatcaacattttcttttatggtgattgctatatgaggcttatataagaaatttttgtcttcctcatgattgcaaagatttccttctatgttttcttctagaaggtttataattttcccttttatatttacatctatgacccacttcaaattatttttgtgtatgaggtaggggtcatgtttcaatttttgctcatatggatatctagttgtttcaataaaattcattgaaaaagactttacctattcagttggcgtggcatctttgcaaaaaagctgttgacgttgtatgtgagggcctgtttctgaactcattttgttttattggtctacttgtctgtccttactccatttccacaccatcttaattactatagtttacttaattactatagtttacttaattactatagtagaactttgttctactttttcatattttatttttaactactttaatttgcattttcacaaacttttataatttttcaatttcctcaaaaaagcctgttgtcattttcattgtgattgtattgaatctgtagatcaatttgcagaaaatagaacactttttgatgtggaacaaaagaccaagaaaggtattcctactgtagcttgtttatgtttatctctcttgtggtttactgagttgctagttttcattctatctggaaaaattttagctatcatatcgtccaataacatgtgtgctctcttttgtttttttttcagactcaactacatatattttagattgcttgatattgtcccacagaacatgtcttcaatctttttctcttttacttcagtttgcaatagcttgtattgatgtgttttcaaattgttctttcttttttagtgtccaatctgctgttaaaccaatccaataaatttttaatttcagagattgcattatttctgtgtttacctattgacttctttttctactgcctacttttttccatagtaattgtagggttttccatttcttgcctgtctaataatttttgattgtttctgggacattatatcaatacattgtagagatttgggatttcattgttttcctctgaggagaattacatttttttaaaaatcaggcagttaaattactgatggatgaccttgatcatgaagagacttgattttaagattatttttcgtgttggtctaatttctacattttttattttagtcccagggcatatccgttcatcctatgacttgtttcttactcctaatgcatggccttctctgtttagatggaaggcttgaggtgtttttcaagcttctctagcttgatgggacttgaactctgaaattcatcttctaccttcggggagctggtgaaatttctatccatctctttagccctttaccattgctgtctgctggattccttattgtctcaccctatgcctgcccagttttggccacaagaaggatttgaggtatattatgcggaagtttatcactccatcaattaaaggatttccccaactccaagttgctctgccacccccaaattgtgacctttgactccttagacttgtaagacacttctgcttgagctctttcacaccatgaacttcccaaactggcaagtgctctcagcggaatagacagttaaatgactatctcagctaataaagcctctctttttcaagggtttatcttttccagtttgtgcctactttccgttgcttcctagtggcttcaaacagattttgcttttcatattttgtcccatgcttctttagtatctattctggcagttgtattttgttgttacatatttgttttcaacatacacacttattgagagcaaagggtgtgttttactaatctttattttatcccactgtttgacccagagcagttttttatacagcaactacttaataaatgttaaattgcattattatttttatgaagaccaattatgaatgaggatttaaagtcttctaaaaaatttgttatatttttagtatactaccctgagtatgagttcaaaggaaattttcttaggtgaaattttgaagcatattattgctttaaaaatttttacttttaaattatttatattaaaaatgtgttcacttatatattttaatattattttaattttaattcattttaatgttgacatataacatgtggtttacaaaactgctaaagttactgcctaatatgattggattttcaatcattttatattaatttatacaaaagcaaacctacttttctgtgtaaaatagaacaaaaatatctcttttatttggaatacggatagtttctaaattatctgtattatgtggttgaaaatatctttgaataattttaatttaaaggaagacttttaaattctattttaaattagacttttcaagattagtctaatggacaaaaaaattgttccatcatgtcagcaatatattaatataatttttgcagggggtcatccaattttcttttattatcaacttcaatattctcaatttgtagggaagtgaccatagccctaatcttaataaattaaccaatttttaggtgtaatttatagtcattaacattatttattactaactacactttgatttcatagcttagggtatacttgaatggaaagaattattataaactggtttcgtttaaatggaatttttagtttgtatataaattcgatatttattgcaggtctcatgatcatgcaaacctggttatgtcagtttcaagaacaggttatattatttgtacaattacaaaccatagttgtatgtgtccatctttataagtttgcctttttgattacttgaaataagtgcattgttgaattaagctaaataacctccttttttctcctttcttcttcagaatcaagtttcttactgggaaatgcccagattgtggattggcctgtagtttatagtaatgacggtttttgtaaactctctggatatcatcgagctgacgtcatgcagaaaagcagcacttgcaggtaggtaacagaatagctaagtaatcttttctgaaatttaacaaaaatctgaatgtaattaaaaggcttaagcttacttggactcccatatacaaaccatagagttaaaaattatgttagaatattagggagactaaattatcaatggaaacacatagcttaagagccactggtgagaacttttgccaaaagaaagatttgtatatatctgtgagttaatcaattcattcaataaatattttttgatgacctaccatgagccaggaatagtctagatgctgagtaatcagaggaacgtcttgtatcagggaacaacttgtggcatgtgatctacagcacctctggaacaactaaattgtcttgaataaaacagagtaaacaccacctggccaagttaaacatggtccatgagaatgtaaagaacataaaataaagctcttatatcctgtgtaagccacatgtacttggtaatggtacattgtttgactcatgtacaacagaatctgacatttatattattataatggttctttaaacaaatatgccatttctgtgagcttaaagagaatattaagaaaaaaggggatcagaaaaaagaaaaggaaactatatataaggaactaatttagaacctaaaacttttcacaatatttcagtaaggccagatgggatgttttttccgtgagttaatttttctttaaagctctcatttaactaagcactgaaccaagttattttagaactacaaggaatctgattttttttttttctaggccaaatcctctgtttttcagatgagaaaactgaggtagagctatgttaagggacttgcccagagaaatagtgatttgttttttctacccattgatgctgagaagcattatatatatacatatatatatgtatatataaaatggttaaatgcatatacagttgaccctggaacaacactggtttgaacagtgtgggtcacttataggttaattttttcaaccaaatgtgatcagaaatatagtattagagaaatacagatcaaaaatatgatattcaaggggatatgaaacccttgggtacagagggctgactttttatatatgtgggttccacagggcgttataactgcaggacttgagtgtgcacggattttgatatacgcagggatcctggaaccaatcccctgtgtatgactctctccctctctatgtatataactgtttatatatctgtgaattaatcaattcattcaataaatattttttgatcacctaccatctaccatgagccaagaataatctaggtactgagtaatcagaggaacatgtatatctgtatatatacgtacatacagagagagaaaggcagagagagagagtcatccatgttatacagaagggattggttgataactctctctttccctctctagatatccttcatcatcatgaaatgtagatattttatattataccattgagtttaaacctgactgcacatagcaatcacttaaataggttttgcaaaacagattcctaccccgcttaaacctactgaattagaatcagtaggtgattctgaagtgggtgggtcaagcagggagtcagtatttttaaccaacagcttagatgattctggtgcctatccaggcttgagaaataatctgctcaaacattctcttccttaatctatgctcctctagccatcctcatttttgcctctactgaaggcattctcatattcattcttcattcctaggtatggaaattggtaaatgggagtgatgaaaatctgtggcttctggttgagagggtccctttgctagcactgatatcgttgggccatattaagcattgctcctctcctatcccccagaaggcagtttaagttagaaaaagctgagtttcatggtagacgttatcctgtggaacaggtccatagagagttccaggcaacacagatatactcacactcgcatttcttattcttggactgctgacatcccgtcttcatgccaggtttatctcagatctcatctacctgaaggtatttatgcttccctaagcaagacaggtttttcccttctctgactcctcatagtttcttgtgtatatttctgttggcatcatcatttggccttaaactaacttgccttatcccttgggtttttattcttattgctttattgcttttgttgccatttttgagaagtattactcttcatatctggatctattttcagtcctgctctcatcccttcttgtgtcccatgtatttgccctatccctggcctattttctttggcaagtacaatttttcctataaaggattcactaagaaaataagtgctggtgtgttatattagctctttgctcctatgaaagagctgcttttcttctaacacaagtaccagattgtaagtgccttaaaagtagggtctccatcttgctcacttttgtatgcacaacaggacacaagacagtgtcttatgtcagtatttattgaattggattggcttgttttgcaataaaccgtaacctaggtctcacatgctctggatagcatactgttatttcttgtatttcatcctgtgttatgacatttgaggtgggagagttttggattataccatgctttttaactgtataaaaaagtgtttgagtctttccccaaattgtctttacttatcagagacagtgttttcaaatgatcatgttcttaatgtaaacaattattacttacttgcataaaatgccagatgtgttttgttaacctaaaaattgcaaccagtttaatgccctcacagaacaatgaagactagcatctgatatatgaacaaatatctgacctttatcagtttttcttggaagcatgatttattttaatgtgttcttcttttaaacttccttattctcttttaaaattaaactatatccattttatgtttgctgtagcattatttagaagactgaagacctggaaggaatcaaaatatccagtagtagaagtttagctacatcatatgttgtatatactggaaggataatgacactggaaaaaactaacaacatattatcaagtaaaaaaaagcctaaaatgaaataaaacaacaaacccaaaagcaccccccaagcagtttataaaacagtgtttgcatcatgactcaaattcttttacatatcgcttttttcccatttcttgaataaatccagaaaagcctttaagtgtgagacacaaaataacagagagagaaaaaaagaaaatgaggtgcacatttagaaacacggggttgatggctaaaagttattatagtgtgtggaattactgacttataagtgaatatggagataagtatttgacactgagaatatccttgtaaataatttaaaaattttgcttatcattataagtttttagacagacataagagaataagaagctacaaagcagtgagcttcattttatatgggaaaatacaagctttgacactatatatctcagaaaaaagaatcatttttgtatccaacttgcattagatgaattaaagtctatagggttaaagtggcaactaggtaaatgattacatgccacagttttgaatgttcaaaagtgaattgttttatggtaaaataaaaacacattaatttgtgtttttataatatcaagaggctaatatttctttcttctgttttcttatcttttttcttctttgtccttctcaacccctcccacattggaccagacacacagaatcaaattaaacatactcctcagtttgtcacaatattgtcattttgctctctctaagcaaggtctctctttattttattttatttttttccttttatttcttttccctttcatcccatcccccttgttcctcttatggttattaattctaaagtgtgtttattgtatgtctttctaatctgtcttctgcttgttaattaaatatgtgtattcttgaaatgatattgctttgcatatgttggttgttaagatctatttaattcctaccacactgtaatatttatggtttcttactcttttcattcaccattatgtttttagacttctttgtgtcaccgtatgatgatctattcatcatgtctgattgttgtctaatgttgtagtgtcttcacagccttcgttctatttatacattctagtagtcctggaatctaactttgacactttgctacctcaaacaacttggaaataagaatcgtcctacacatcttcttgtggccctgtgtgagacgttttctgtctctatccccagaaatgggattgctggataatagaatatatgcagagtttgtaaattaactgctataagactgttacagagtagccttctgtttccattctcagcagccattagtgaggattctggttttcctacatttttgctatgtcataatggtactgaaattcctatctgaaaatatctgatgtgtgctaggtattgtctcatttttgttttaggtaaaattatgacactatgacactttcggatccctaggaatttcaaatgttgtccattttactgtggacactgcattttccacgcctttgcactgttttgctgtttattggaggacatgaaaagtatcgcatgtttaaaagaggttatagactttgggagaatgacatttaaaagcatatgatcttatctcatgacctgtagaagctctgacatttgggatatactgtcatagattaggtaggaaccactttagcattttacttctaattaacctgaaacttttaagagcctattctgctgtcattttttgtttttgttttggatagaggggtgagaagaacaatcaggtagtttaggtagggtggattgaggggtagatagatgctctcagatacatttttttgaaagaccatttacaatcccttatccaaccccatcaagttagacaatgagtcagagctattaagaaacagtttattgggcagatttcacagcagttttatgaacacaggattatctcagcagctaccaagagcatgtgacacatgatggatgccagtcagtccggctccatttggctgagggctgtgcttctcatggtgagactgatgaaaagtgttgaagggcagaggtgtcttggtgatgtcagactccgaagattacaggtatacagtgctatccctgtttttccttaattacatgtcatggatcaaccatttatttactccagtgaaatcctttgaagaccatgtaaatcaatgggttgtgaaaccttttggttatgatcctctgtataaaggaatgtctttgatttattccaaaattacctctttcagattttgaaaactgtatttcttttttttttttttgagacagactttctctctttttgcccaggctggactacaaaggcatgatcttggctcactgcaacctctgcctcctgggttcaagtgattcttttgcctcagcctcccaagtcgatggggttacatgcacccgccaccatgcctagctaattttgtatttttagtgtagatggggtttcagctggccaggctggtctcgaactcctgacttaaggtgatctgcccgcctcagcctctcaaagtgctgggattacaggcgtgagccactgtgccgggccgaaaactgtattcttgtttttaatttttcctccttaacttcccctctctcaggctttatcttttttgatccttcgactgtagatctcagtccacctcccattaacctttatgattctatggttgtggccacttctgagctggagaccacatttaccaactgcgttaagtctatctgtgttgctttgttttgacgaaggatttgctaatctatgaactacagcctgcagataatattaccctgtattatggtgactgaatgtttgttgcattttagtctagacacaccgttgcacatttagcagagtaagagaggttggtggaactcatgaataggttatgttttcttcagagttgtaagattcttttctcctttggaagtctgtcaatcgttatagccattcttacgctaggtactataatgaggcttgttcgtgagattttgagagcagagcaagggatccaagaataaataaatcctgctacaagcccaaaccacctgttcctcaaagttttctaggtcagacacacatgaacgataactgccagatgcctaggcgagctgggtatggcctagaccaggcctgaagacaacttatcccttattcccaagatgaaaccagtcagttgtgtgacaagaaaagtggccagattatacaggagcaggttctgagtgagcgtttgcttcaacctcatgggcttgtgaagaaagaagattcacagaaccatgcacatctccctttaagacacagtgacacactgccttttggaaagcatggttcctggagaatcctggagaagctagggagtgaggctggggtggggaaggggcattctagtcccatccgtacattccagtcatatttcagccattgtgtaacacgttataatttgtaactttatttgcattatccttttgtcaccctttgagttatattattattgtccttattttactgatgaaactatgggtcagagaggatatacgacttgtccataaattatccactttgtaagtggtcctccaaatgcaaaagtcctctgttataccatgactgcccaatattataacagagatagattgcttctgtgaatccaattctattttcctttcaataaagtaacagtgcagtagttcatttataattaccaaggaggagcttggcatcctatgtaagagagcaagtggaagttttgtgattttaaaaatatttccgttacatattccttgaggatatttggtagaagatatgaaaactatggaaaattattatatatggtttctaaagcccgttgattactatttctataatttgtgacccctcaaattgattaaccattcaaagactgcattgagcttcagtcatcctgagtcaggcttcaggaacctgtgataaaacatttcagcattcatatgtgacaaagccaagcaaataaacaaatgtgccatacccacagagaatgcgggaatcattgatttatcagtatggcttggacaactttggctgaaaatactttcagagattgaattaacctccagaacacttgccttgggaggatagatagatagtacatttctgacattctttatagtctgttttgaaatacctcttattatttaactgctacatgtcaccccttcaaatacatgttctatcactggaaatatgcggtataataaatgaaaaatctgagtggaacaatgtaagaaatgaaagactattttaaaaaccgcattcggattttaataatataggattatttttcttaagtgcctttattttcctaggataagtgattttagcattggaaggactaactaatggaggtgtattatgaaatttttatggtttatttaaaaattgcttgtttgtttttatcttctcttcagaagttgagctgcatcagacctgtgttgcattttttcttcgttggtgttattaaaccaatccctcaaagagcttcttttttaaatttgagttgtaacttacttttaaatcttattggagttaatttttgataatttttatcctagttgcttgttatatcataaattctttcttattttgtttttctgttgaccaattgcgaatattatgtttcagtttattgaaccacagacacctgtcatttagtagcagtgtgaaatggtttttctttctttcttttaagactacaaatatttacttagtttaattgcccttatcttgaattttaaaatgtttctgctttattaagattctttaattaaaaataaaagttagtaaaaaaagatttaaaaatttcacttgtctataaaaatattatgtacaatattaagctaatatttttttgggagagaagtggctttatgttctttagctgaataattctaatttaattgtaatgccttcaagcaatttttatgaaactctcatgagctgaaatttcagctttgacagtaacagtggcttttcagtgccagcttgcaggtgtgctttgaggtttcctgtgttagtctagatataagattatggaattaagagtctgtcattttattctgagatccttttacttattttattattttaatgacaattaaaattttcctttttaaattaaatatattaaaaatgaaggattcaggtttctcggtgcttggacaatctttgatctgccttacccactttcatttctgactttctagaattctagttgcttaggttggtgttatagaaggtgggcttgagttaccctgtaatttctggttgtaatgtggtgctgctattggatcctgtgtgtcattactggatcttgctgaaaaactatgccttttaggttgtaaattttattgattggtattttcaggtgcagattttctgtgagcctataatgaagctgaaccttcaggggccctcatttgagtggatgtctttcgaggctctgtttgtaatcttgttttataattttgtattctttttcttaaggagggcttcacaaattgtataagcttcagcctccaccacactttggatctgcctctagtaaatatgtgaactctttgaaaactgaaagaaaagcaataacaaagacagacttttgatctttcaaaatcttagttaaggtgtttagtaatgccacattttctttcctggtggaagaaatggtctggacaatcataccgatcagcagaactgtgtatctaaaaccagatgtacaactgatgatttgaaagcattgagaatggagttttagagacatgtagttcttgggcaagttttgttatttagatgatcagacttttgccaaggttctcttagaaaaatagagaatgtcaaacattagaaagtttttgtggaatatggacattcactccttaatctatgttttgtatgttcctctaaccactgtaataatgtatgattccttcaagatgccatctttacttcccttccattagccacacttgtacctatcttaagaaaattccctgaaatgatgagaatgtcaatgcattatatgtatcatatgcaatcctcacttttttaatgatagtatgggaacataaggtccatgcaagctgaaaccacataatactatcttaatactcaataaaaattatgatggttttagcatctttaaaaatgtttgtcaaaacaataaaaactctcttactgttggttatcaatgcagggagatgatatcatagtaaaactcatatttatttagtgtactgtgattttgaacattagaaacgttgagaatggaggaagtgttttatttcttcttaaaaaacttatgagtcatttaaacaattctttggcttttcagaatgtaactttctgtataaagagagcatcttttctatcttctcgaaaattgtcatcctcctttctaagttagaattaatttcaaatattttattcttccactttcactattgtgatcaatgtactagagctcctttaataaggagggtttttttggtttgtttttaaactggtgtcacctcctctgggaaaccttcatcctttttgtcacaaccactttcttcatttatatggatgagctcaccttcactaagtccttttggatgcatatttagagtctcccaaatggcagtagtattgacatttccatggtcacctatttctcttataacttcatttatgttcaatttgaattccacttccaacattattatttttcatttctttggtggactttagtttttgttggctacttactgcttttgattatccatttttgtaaaatgtcatatgggtttatcactgagagaaaaggaggcaatatgactacatgcttttctgtctgtgcgtgaactgagtaacagccgtgctgtttccaatactgacaggctttgaaagaagtgatgtgatcagtgactggttgtgaaggtgcatctgttattttccagtgatttgtagactgaagatcaagtggcaaagcttgcactttgtgcaattactcacagttaacatactgtggaaactgaaatttgaactgtgctgtggaactggtgttatttaactaaaccacagtgactgaaatctgtgcatacaggaactgtgtaaagcaagaactgcctctcatgatttgactattctgtgtaggagcaatattatattttctagccacatttgactagtcaaagacaattatatgatttttgtagcatttgaaaggcaacacaaaagtgaaatcgattgtttgttttttttcccccccagttttatgtatggggaattgactgacaagaagaccattgagaaagtcaggcaaacttttgacaactacgaatcaaactgctttgaagttcttctgtacaagaaaaacagtaggtatctcaattattaataagatgtgccaactctttattaatattatgtttggtaagtcgtagtggagctaaaatgtagagagcatgtaaaccttctgttgcttcttttcttggcaggggcagaggttgctggtgaaattagataataaaattaataaataattctacctatggaaagtaaccttttgaggaatggaagaaaaatgtgatgcatcttaatatgacttttgtatcaggcagcaaaatattttgtaattaatacttataataaagatcctataattatgtgacaacgattaaaattgacagatacatgtattaatttcttcttatggttaaagaaaacggtaattgttaacactggatatatgcaattacctttcgacacgaacataggcaatgtgaatatgtggtagctacttgaggggaatctctaccaatatggccttttgccagcctcagactcttttgtgagaaagcctagtagaagtagtcgttgttctcagaacaagtcattcacgtttggtaaatttgtgttgattgttgtgacctttctctgggatgagatttgtatgtggtaaggtatgcattatataatgacataatatctggtgatatagactttccatcagagtttggagggaaaaaaaccaacatgacaaaaaccaacagtatactcaacaactcccctttctaattcactttatttgcatggttacttacatttatctttttgctgtttcctcaaattgttcttgctttcttttttgaaatgaacagtcacttcataagatgagtcaatttatttattgttaatagcaaatgatagcaaagtctactattatctttgatggaaattgatggttactaaattcttcccaagtttggaaaacattctcgcttcaacaggaaacgcctgttccatgttcagtgcctgttggatcttgtggagcataatttatcctctccatttacttgaaacattttttatctgtggaatatttggaattaaaattcgatttctctttttattagtagactaacaaaggaataacagcgtgagacattgcctcaaagtagtgcacttgataatggaaacatttgtttttagtaattttacttaaggaatggcttatcttatttttcattttacatcaagcccaaagagaatttcagtttgaagtcatagctaaatgtcagctagcttgtcacctagaaaacaatcccttctgaatggtcagctctgtcctctgcaagagaaaaggcagactgtaggtgctttctgggtctttttttgccaagtctaagtacatattgataatttgtaggagacctgtataccaaaaaatccttcattttcctatggtttgttaagccttcaataatttagatatgtgctccaagtttagcaaataatttaagaatattctatataactaaggtcattcactctctgacatttaagcaaaataaacaaacatttgcctgactttaaagccccaaagacaagtccatagttcctgagtttctcaaaaaatatgtaggtgaagcctaggtgacatagcaagaccctgcctctatgaaaaaaaaaatagctgggcatggaggcacatgcctatagtcccagctactcaggaggctgaggcaggtggatggcttgagcccaggagttcgaggctgcagtgagctatgatcatgctactgtattccagcctgggtgacagagcaagaccctgtaatgacaaccaccacaacaaaatatcttagtggaatttctgtttatttactttaaatcatcttagtaattacttgaattttacatttccagaagtctttccaaggtagtttagttattttgccttatgttaatggattgaaattattatctgatcattgttcaggcctatctggttctttccagataactctctatgcagataagtgcctgcttatagccaatgggatatataccccatagcattgtaagttaaaacttgtgcctcctttctgtgcactatctacattgagttttgcttttgttttcctctttagtgaaggataggtgttatccatgtattataatggagttttgctatttaaatgcagcttttaaaaagtcttgtaaatagctgaaaggttttgaacatcagctgagaaaagcatatttttgtgatttaaaaaaagtgttaggtagaaaaattcacgtctgcagaaaactgttttgggaatgcctatgtgccaagttctcccaatacgtcctttaagcaattaagttaaacaccattttgcaaatgggggaattgcggcatctgattgaatatgcatcaccattgaaattttagtttgcagcctctgttctgtaggtccagtgctctgattagcagggggctgtttctactgtggggaaagaaatggtagctctgagcttaagatagctctttctggccgggcgcggtggctgacacctgtaatctcagcactttggaaggccgaggcgggcggatcacgaggtcaggaaatcgagaccatcctggttaacacggtgaaaccccgtctctactaaaaatacaaaaaattagccgggcgtggtggcaggcgccttgtagtcccagctactcaggagtctgaggcaggagaatggcatgaacccaggaggtggagctcgcagtgagccgagatagtgccactgcagttgggcctggacgaaagagtgagactccgtctcaaaaaaaaaaaaatatatatatatatataaatataaatatataaatatatatattatgtatataaatataaatatatataatatatactatatataatatataatatatataaaatatataaaatatatataaaatatatatataatatatataaaatatatataatatatataaaatatatatataatatatatatatggctctttctgtgtactcaaatgcagaactgatagccgaggctcctccaagtcatcaatgctggagcactgcaccgagattcagccacagcaggttcctctacttaaccctcccagactccccagccccctgaaccccaaatccagaatatgaaggatctatcaccacatacttggcagatactcagcctacttggggaaatatgaccctgtggcttggaaagttgaaaaacaattaccttcatatctaaagcagttttaaagagagcccagactctgtgccagaatttgaaaagttgcggttttcacagcaaggcatgaaatctaacatcatctctttctgttcagatttctaacagaccttggaaaattacttatttttttagtgcccttttctctttgtttatgacccttctgcctcaagcttactgtgttggaatagctacaggccatgtatccactaacgtctgggtctggtgatttgtaaaaccgtgcacatcactcacagttcctggtcacgctgtgtaaaatacgaaaacagaaaaaaatgaacaagcctctcggggagatgatgtgattatttttgaggtccctgtctcattctaccatcattttggaaagggccacgtccttccataggccccctggggttgcagaaaacctgattgtcacagctgaatagtcccatagaaatctcctttctctaattctctgacttcttgagcctggtagttatctcatcctgtctaaatgaaaaattcccctttgtggtgacattaggtgacttttttattttttatttttttaggccatgggaatagaagtgcttcttattcggttcttaatggaagctagtaaaaggctagggtcttacctacagactattaatacctgcacgtttcactccccaaatcctaaaccttacaaaaacctttatgtcttaaaatagaatatttggaggggctttactgcactgtggcatgaagagaatataatgagaaaagtgtctctttgattgtaatgtaaatgtgtctctttgattgtaatggaaccttcccttcagtgttttatcacctaacagataattacacctttgaaggcatttcttgtgccttcacatatttctatttgttatataccagttcctgacttatccaaatgataagccttgaatactttgataccctctgtcctagagggcagagtctgcagtagccatccttcgaagaacgaggtgatagagtccagcttcatgctgtttaagtgagggaggtaggcagcagtggctcaaaaagatgcctggggatctcaaaagctggggacacgtctatttttcttcaggctgccttaacagtttcaggtagagctctgtgtacatcggacatcaagttttgctgacatcctctctctctgatgtggggatgctgtcaaagccatagagctatcatataagtctatctgactgatgagagagccttgggatagaaacagtattttagatgttcctccaagaggaatgcttattagaagatcaggtatggctgttgcagttaattggaaacacttgtcaaagtgacatgacgagagaagcaggtaggagtgatcacaattggtaagactctcagaagaaagttggtgagagcagcagtggttgagggacccagacctacaggtgttgctgggattgcttaagtagcaagactgcctttgtgttcctgcattgtgaaatgacagcctgtgctttactttagaattttgatattttggcgtgtatactgtgtttattaaatttgaacaactggtagttgatacaaaattaaaggtttacggattgtttgtagtaattaatatactgttgttttggtgttgattcctggcacagctgttggcagctgaaggaagaaggaagccaggagaccaaaccactgctgtggccgtgccacactctaatgtcctttccccaacttctttctgttacaggaacccctgtttggttttatatgcaaattgcaccaataagaaatgaacatgaaaaggtggtcttgttcctgtgtactttcaaggatattacgttgttcaaacagccaatagaggatgattcaacaaaaggtaattttcaaaagaattactacactgaaaaattaggctgttgctaaaagatcttcttactgttttacctctgctgattgaactggaaaacaaaattctactatgtggcctttcttttgcttcattgcttggaatctgttttattcaatcatactgttggaatagaaatggcatgtctatccaaagttgaaatatagattggttaacttatagcatgagtaagaaattttatagagcattttttttgtttgtcttttagtcaaggtctcactctgttgcttgggctggagtgtagtggtgtcatttcagctcactgaaatttccatctcccagtctcaagtggtccccccacctcagcctcctgagtagctgggactataggtgtgcgccaccatacctggctaatttttctattttttatagagtcagggtttcgccatgttgcccaggctggtttcaaacacttgggctcaagttatctgaccccccttggcctcccaaagtgctgggattacagacgtgggccatacacctggctgagcattgttaattttgaatcaatatgattggaatttcaacacctcataccatggtgagctttagagccaaaacgtaacaattggtggaatggtttgggtgaaatctaactagagctcagttggttagttgattgaattttgttgaattacaattgtaatagttgactttttcaagttacttttcagtttttatttattctgttgtgtagtccctagagtagatgttgctagattatggaaagaataattttgtcttcaggagagtgactggcaaaatgcaaaccttctgactgtagtcttattgactataatagtcaaagagactgctatagaaaccactagtcagtggcatgtgcttttacctccttttctatgtaatttattcccaatttattctctccaattatgtttaaattagaaactggtgtcatataaatgaagtatttcaaataaccttagaagtagtttttatgaaatgttatttttaataatctcttaggaaactaaaaataaaatgtcttcctctttgcatttgacaaacatcgcctttccttacttctttttaaaaaactggcatagaaactttaatctttccaactgtaatcataattatagaaaaaatcacagtaagtttattccttgcataggaactcacatatataatattgtatctgctcagtttctggttaacatcaaatagcgagaggataatttttacagtgtgcaaaccattcaaagtatgacagcaatttatttgtgctttgaagatcgaataaagtattcaatttggacccatattccctgttcctttacacatagactcagtgcctgggaaatttaagataactataaatactacttttaaattgaacagtcttctaataatatttagggttttttttttcttttcccttttttttttattattattatactttaagttttagggtacatgtgcacaatgtgcaggttagttacatatgtatacatgtgccattctggtgtgctgcacccattaactcgtcatttagcattaggtatatctcctaatgctatccctcccccctccccccaccccacaacagtccccagagtgtgatgttccccttcctgtgtccatgtgttctcattgttcaattcccatctatgagtgagaacatgcggtgtttggttttttgtccttgcgatagtttactgagaatgatgatttccaatttcacctatgtccctacaaaggacataaactcatcattttttatggctgcatagtattccatggtgtgtatgtgccacattctcttaatccagtctatcattgttgggcatttgggttggttccaagtctttgctattgtgaatagtccagaatctacaatgaactcaaacaaatttacaagaaaaaaacaaacaaccccatcaaaaagtgggcgaaggatatgaacagacacttctcaaaagaagacatttatgcagccaaaagacacatgaaaacatgctcatcatcattggccatcagagaaatgcaaatcaaaaccacaatgagataccatctcgcaccagttagaatggcaatcattaaaaagtcaggaaacaacaggtgctggagaggatgtggagaaataggaacacttttacactgttggtgggactgtaaactagttcaaccattgtggaagtcagtgtggcgattcctccgggatctagaactagaaataccatttgacccagccatcccattacagggtatatacccaaaggactataaatcatgctgctgtaaagacacatgcacacgtatgtttattgcagcaatatttaggtttaatgctcatttgcttgttttaaaattcatggtgctccatccaacagccagagaatacatattcttcacctcacaaggagtggagcattcaccagagagataacattctgggccataaaactaccttaataaatttaaaaaaatataaatcttaaaaagtatgttatcagaccaaagtggaattaaactagaaatgagtaacagaaagatatctggaagatcccgaaatatttggaaatgaaacatgtttctaaacaaatcaaagaagcagccttaagataagttagaaaaatatttttaactaaagaaaaatgaaaatacaatttatcaaatttgtgagatgcagcaaaagcagtgcttagagggaaatatgtaacattaaatgcatatattagaaaagaagaaagacataaaatcaataatctaagattctaccttagaaaactagataaagaaaaacaatttaaaccaaagcaaactgaagacaaggaataataaaccttacaacagaaatcaatgaactgggcaacaggacaacattagagaaaatcacaaaaacccaaagctggttctttgaacaggtcattaaagttagtaaacctctagccaggctaactgagaaaaaagggtaaagacacaaattaccaatatcagaaattaaagacatggacattcaagcagagtaaagggctactgcgaacaactctatagctgccattgataaattggatgaaacagaccagttccttgaaacacacaaactaccaaaacttacagaaggaaaaatgaacttcatttgtgctttatttatttaaaaaattaacaataattaataatcttccaaaaccaagaaaagaccagatgcagatggtttcattggtaagcgctaccatacgtttagggaagaaataataccagttcaagtcttttccagataatagaagcagagagagctctcttaacctattctgaggcaagcactacccatatagcaaaaccagaaaaagacattacaagaaaggaaaactacagacatattttttttttaatttttttttttttttttttttgagatggagtctggctctgtcccccaggttggagtgcagtggtgccatctcggttcactgcaagctccgtctcccaggttcatgccattctcctgcctcagccttccaagtagctgggactacaggcgcccaccaccatgcccggttaatttttttttgtatttttagtagagacggggtttcactgtgttagccaggatggtctcgatctcctgacctcgtgatctgcctgcctcggccttccaaaccaatatttttcatgaatatagattcaaaatcctctacaaaaattggatccaacaatatctaaaaagaattatgacaaccaagtggggtttatcccacttatgcaaggctggtttaacatgcaaaaaccagttgctgtaatctaccatataaaaatgtaattcacaaaataatgagaaaagtcatgattatgccagtcagcagagagaaagcacttgctgaaatccagcacttgttcatgataaaaactctcagtaaagtttgaatagaggggagcttctctagtttgataaggaacatctatataaagcctataatattctaactatttttttcttatacccattaaccatctccccatcttactccccaactacccttcccagcctcttgtaaccatccttctactctctatgtccctgttgtcaattgttttcatttttacataactaaaagagtttaattggattgtttttaacgcaaaggataaatgcttgagaggatggatatctcattctccatgatgtgactattaacgcattgcgtgcctgtatcaaaacatctcatatacctataaatatatacagctactatgtacccacaaaaattaaaaatgaaaaaattctacagctaacaatggtctatatcttaaagttatatatttttaaacaaaagagaaataattggcatctgatttgtgacctaacattttcatacacgaatgataatcagactgagtaaaaagctttgatcatagtcttttcctctcaaaaaagtatgtatttgtatttgcactacatgattattgttttctcttacttactttaagtgatttcatggcacagatgaagttggccaaagaaagtacagtactttcgcagcagttttgaccggctgaacctaagtggtggtgtcagtaactacatatctatttatggaaactcaaagtcggcaacattttgcagtgaagttggggaaagggtgctgatgttgaagtgttgacttttctttctgaaattaatgcttctccatttatctgcatctccacatcagaatcacagaattctttgtaaggctcagtctctttgaaatgaataattcatttttatacaaaatgatatttgaaaaagctcgagacaactcagaccacttgattttttaactatgagtttgatagacatgtaaattagaatttatagggaaaatcagaccccattgtgaaaagcattagagaaaaaggtctctttccagtgccagaatctgtagatgagcttattttaaatagacttttgagacttctctgtatcttccaaacacatagcagattattgaaaaagtattgtaaaatgtaactatgaatggtgtgtaggagctactttctattattcatgtgaactgtacatttaacatgaaaaattcaatagaaataaaatatttatgccattaagtcagcatcctatatcttgaagctagcagtgtaggaaagtacattttaaaatattggcataagcacctatctttctactttttaaatcaagtaaaggaaccatggaacttttgggaaataatgggtgcgatgacatgataacaccataatatcaaaataatttgggtgtagatcattgaacttgggtagagtagacttgctgttgattcagttttgggcaccagagttacttaacctgagcctgttcaggactcttacaggaatattttatcctccttgtcttacatttatctattttttttttcccaaccaaaaattgggaatatggtacaggcatgattctaagtcctggagatacaaagtctcttctgtcacattctagtgggggaggcaaactagtaaatatatagtggaagctttcttttgattgctcccgttgtctcagtaaaaacaggaatcacagttatcaactgagagtaaagatggtgaagggtgtgagaagagtggagtgcgtctgaactagttatctaagagagtggaatagtgagtggacaagagaaacacagcaggatttctgagctgcacaaaggtccatttcaggctagtggtcataaatttcactagttatctatgagcataatattgtgttttaatccactcatatttagtcaaagaggtatagatgcagaagtaagtgaaaagttgtgtttatccaatgttgaaatttggtcaagtgaataagagaagactcagggacttcaaagatctgggagttgaggatgtttacaagggtgtttgcaaaattttgaagaaatacttcattgataaaaattctgccagcatacaagaaatagtgttttagcattcaggacagacaagtgaatctatacaccggcaaaatcagaatgtaatcccagagcaaggactttttaccttcttaacatgaaaaggggcctgatgattggaacaagggtccaagtcctttgaggatttgccaaaattgactggaattaacattaatctcctacttgtatcgatatttttaccaagaaacttagacatatgattgaaagacttaaataaatggactcactctgaattttatttctgattcatatctgggaaaataactacaacatgtgatggcagccaactaatttgaacgtacctcttccttgtaatcaatctatgattaccaaacttttattctgaattgatatttgatcttactggcactgggtaatgtcaacactatctttgaattataccatgatggatggttgcaaaacccatcgaaagggaaggaagccagtgttgatggagtagttaatgtatgccaagaattttatattcattattggtcatttctataattctgaaaattagtattgttgtctccattttactgttgaagattctgacgctcaacgtctgactgatttcaaatcccatgttctctctattgcacccatgctgccccgtccttctcagtggagacttattgttgaggtttaactacctcaatcccttgctttcttttttccccacaaaaatgaagcacaggttgagaatactttcatttggagagaattatgctgctttgaaccaaataaactaactgataataatttaagggggcaaagtgttcccgttattttttgttcctggtattgaggtcttgatagtgttgttcaggtaatcagtcagtggtacctgatacattataataatacaaagaggaaaattacagccaagaaatccattctgtcagttatccatatgtgttctaaaagagatggcctaaatctctgcccatttatactgtacagtattttcaaacagactccaaaactgccaagataattacagtgtgaaatatcttgtgccaaatagttatggcattttcttgccaataattgtgacaaaaaaattcccatagaataaaaaataacagccaaaatagcaagcttctccttgtggaagccaatggttttctttagagaggaaacaacagatgaaatatgagtaattatactatgtaatgtagtctctttggccaagagcataattgtttacctaagctttttacttatagattagaatcttgtgttgcagtctagtagattgatttaactgcctctgtgacttctttttatttttaagattaggcagtccatgacaaagaggttaattgcaacccaatagagctaaactaatattttattaagaaggagctggcatcctgagcttttaggagaacaaatattctcataatgccatgaacaacttacagagcaagtattaggctcttcatattcagctctctgtttgcattaccctgtatcgaccacatctaagtaacattagcaaactttgctgaataatcagtcacaccagttagatctctgtaaaggtgagatcagtaaatgtatcacttggaaaagttagaactgctgatacgtcttttttctctgacctagacagtatggcagctcaactttttcaaagtttatacagtacaagttggtgggagatcaaatgaactaatataggtaataataggtaattccagatgtgttcaggaacacaaagggattggtataagacattgttagtgatagcaaaaatttagaatctacttcaaagtacatgattgaaacgtatgtgtgatcaggaaggagcaaatgatcaattctctgagatgataggggtgcaggtaagaaccaggtgccatagtggtttagtctggaggtggatgggagagaaggggaactgaaggctgtcacatttctatgaccattttgtccaaagcaatctacagattcaatgccattcttatcaaaataccaatgtcattttttacagaattagaaaaataattctaaaattcatatggaactaaaaaaaccccaaatagccaaagtagtcttaagcaaaaagaataaagctgaagacatcacattacctgacttcaagttatattacaaagctatgttaacccaaacagcacagtactggtataagaaatagacacattgattaatagaacagaatagatagtccagaaataaagccacatatttacagacaactgatctttgacaaagccaataagaacatatattggggaaaggagacctttttcaataactggtgctgggataattggattgccatatgcagaagaatgaaacaggacccccctatctcttgtcatatacaaaaatcaactcaagatggattagcttaaacataagacttgaagttataaaaatactaggagaaaatctaggaaaaactcttctggacattggtgtaggcaaagaattcatgacaaagacctcaaaagctgaggcaacaaaaatgaaaacagacatatggaacttaattaaactaaaagcttctatacagcaaaagaaagaaccaacagagtgaacagatgacctgaagaagggaagaaagtatctgcaaactatttattcaacagaggactaatatctagaatttataaggcacccaattcaacaacaacaaaataactccattaaaaagtgggcaaaggacatgaatagatatttttcaaaagaatacatacaaatggccaacagtatatgaaaaaatacttgacatcactaatcatcagagaaatgcaaattaaaactacaatgagataccatctcacaacaatcagaatggccattaaaaagacaaaaaatagcagatgttggtaaggatgtggagaaaagggaactcttgtacactgttggtgggaatgtaggttagtacaacctcaatggaaaacaatatggagatttctcaaacaactaaaaatagaactaccatttgatctggcagtcctgctactggatatgtaccaaaagaaaataaatctttacacaaaaaagatacctgcactcatatgtttattgcagcactattcacaattgcaaagatagaatcaatctaattatccatcagtggatgactggataaagaacatgtggcatatatacacaatgggatgctactcagccataaaaaagaatgaaatcatgtcttctgcagcaacatggatggaattggaatccgttatcttaagtgaaccaacccagacacagaaagacaaatatcaaataatctcactcataagtgggtgttaaaaaaatgtgtacacatggatgtagagagtggaatgatagacattggagacttgggagggtgaaggcgtgggagagggtggatgatgagaaattcttaatgagtacaatatatgttattcaggtcacagttaccctaaaagccctgaccattatacaattgatacatgtaaagaaattgcacttgtacctcataactttatataaattaaaaagaagactatcatgtttcttatggcttctgcttttttcaataacatttttggcaggggtttgtgctgacagtaaggagagaaggacagcataggtgttgtgagaaaaatgctaactctttggaactggaactgcaagaaggccctaatcagagtcaaataaaaagattactgagtagctcagaaagctcatctctgaatgctcccattgattttaatgtgtaccaaaacattcatttgctttgcattgattctccatgttctagggcattttgatagcaaaactcataaacgattactcaattttacaaccgcctttggctttgatttatctaggaagaaagaatcctttccaagtcttttctcctaaatttctctcttctggtccgtctgagtcagttcaacatttgccaccacttttttttcttttttctgccagcagttccccagttctctttctgaaagcagattataatccttaacacttccagaattccttctctaaccttccctaccatgcctttcctaccttcttcaaccaaaagacttccttcatataagctatgctaatacctaagaactgaatgtattttcttctttaaattttaaatatttacatataatgcagatgctgtactcctatttatttcctcattaatcatcattaattcattcactaaacaaaaccattcagtaaaacattccacaaaaacagatctagtgcccactatgtgttagtcaaccaaggtaatatggtctggctctgtgtccccacccaaatctcatcttgaattttaatttgaattgtaatccccacattgggggagggacctcatgggaggtgattagatcatgggggtgatccccccatgctgttctcattatagtgagtaaattctctgagatctgatggttttataaggggattttcccctcttggctcggcacttctccttcctgccaccatgtgaagaaggatgtgtttgctttcccttctgccatgattgtatctttcccaaggcctctccagccatgtgtaactgtgagtcaattaaacctctttccttcatatgttacccagtctcaggcagttctttatagcagcatgagaacggactaatacacaaggatagaaaatataagatctggcaactaaaagtcgcacgatgcagtcacttcccttttcatctatgttcaagggtagtcttactcagaatatgctgatttaaaacatttttagaatgatgggttaatattacctttctctttcattttctttctgtttttcaaatcaatgatagtcctatttttattcatggagaaaaatgcatgtgttttatttttactgtttaaaaatgattttttttcttcaagaaagtaaaataaggtaaagaaaagagatgaaatattccttgatcacactgacttcatgtgtaaattaaggtacacacatacacagacatttgaacaagctttttttgtattaggaacaactgcttcctccttaagaaacacagttgtagtctgtgctcatgatgcttcaaatggaaagccagaggatgacaataagctttcattgtcatatttctcctttctcacacttattttcatgtatgatactgtgaaatcagagaaaacatgccatttgatgatttgtatttgtttatggatcatttaatttattcctaaatgtctcctttttttttcaaaatgttttctggataaacctttttttcacacagggaacgaaagtgggcttttcttttaatccaatgagttataccaagggctgtaattttacctgttttagaaatctgagccttcagtaagtaaaagattgacttggaattttctagaaatagtcaaggcaattataacattctattgatgtaaggtgcacagattatcaccaggtaaaattataatatacctatgactaatatagttactgtcatccaaagacgccctcaccacttttaccaaacaaagcaaaaccaaaccaaaaaccaatgataataaaacaaaatgagatttattttatatctgatttttaaagttacaaatacaattgatttattttatggtgtattttatgccaggccttgtttcaagtgctaagaatggagggataaacaagagtttagcaagagtggctattatatcaatcaacaattacatcagtgttgttagtgccaggtgaggtatgcatcccatgatgtgcgtgtacagaggagggcacctctcacttgtgggtggatcaaagaagcatccaggtaatgcttttactgagtctgcagttaccagtaagtgttagccagaaagatgggggagggaaaagacattccaggaaggcagaatgattgtaacatgtgaaaatacggaaacacaaaacagcgtagggtgtgcaaagaattcctagtagatttaattttagttttgaatttattctttatttgatttgctattgattttaataaggctgggatgcagagcatgtgtgagaaagtggcaagagacagaggcagagcaaatcacttggatcagaaaataaatgacctgtataccaaggatatacagtgttatcctggaggccttcaggtttctgttaaagggtaatagggtaaaaggcatgtgttttagaaagaactttgcaagcaatgaggatgtggttttggaatgctgcctaactcgggtgaaagacgttgtgttgtctgacatagtaggggtgcagagaggagattcaatttgagagatatttattgatgttataatctataaggctaggaaataagtgtgtgtgtgtgtatgtgtgtgtgtgtaggtaatagtgaaaagaggatggcgaatttcatgtttctcatttgggcattagaaatatcttggggccatttgacaagatcagggatgcatgagtgaggcagagtgggtgataaagggggaagatggtgtcagttttggacatgttgagtgttgtcagatgcctgtagaatactgtagtaagaaaagtccagtggctagctagacacataggtctggcattcaaaagaaaagtctcaatttgtcatagagattgcatgttggtttttcattaatgttgagtttttagagagttggtgtcatatctaataccctttttttttgtttccacagcacattgtacagggtaagccttagggttgcatacaattcccaaaacctaactttttttttgttctaattactaggatggggtccaataatgtagaagaaataaagactctccatcaattgatgccagtttatttcttttccaatccagttattgatacatagacctgaattggtggggcaatacaaagcttaaattaaattagaatcagcctgaagaatagtagtaaagaatgatgtcacctgcattttatggtttgacagatattaggcaggtgtatttccagaatttcttccttaattttttttttgtcatatcatctgaaatttcatcattgtcatcattcctttggaacatcaggagtttttcagttttaaggagttgcctgataaatgacctcatgaagggtaattgtgtagaagttatcagatagtgttaataaaattttttaatgaattggagcttttgagatatctagggaaaggataattgagacaggatgagagtatggctggttttgttctatttgttcacttcttattgacatttccttgagattaatgattttattactggcaatttgaggccccagaagaaaattctttcccattaaattgcatttctttcccccaaaagtcactgctctttcagaagacattattaacaattctagatattccaaaaataaatttaggtatcactgcagttgttaataacagataaataacattttgctatgttacaaggaagatggaagtgtgtgaaatgaaccataaaaagtaagatttgttgaaattcagttttattctcttatatctgcacacaaacacattgaaggactattataattagggtaagactagctgctgtaacaaataaatccccaacttttagtggcttaatacaatagaagcacatttcttgctcatgtaacagtccaaggcaaacgatcctggctggcatatggcattttcccacacagttattcagcagctttgctatccccttgggccttgtccagctggtagaaagaaagagaaattgtggagaagtcacagttgtttcttaaatcacggcatggaagtgacacacattacttctgtctgcattccattggtgagaaccagggacataggccatactgagatgcaagaaattctgggaagtatgttcctaattggacagctatttcccagtaagaaagctgtacaatgcaaggaggagcacagaattttgtggatagctagttgcattggctacagggactatacacagatatgggcaaaatacaaaggtcacacataaaaattgctcattattttatggccacacttcaaatatatgagcatgtctatacagaaggaaagaaaatacttttgtttgatactttgcattcattttggatgttatgtggttgctgagatctttttaatgctagcaagaatgttggattccttattcatttgtatgaaaaactgagactttctttccttatttttaaggttggacgaaatttgcccgattgacacgggctttgacaaatagccgaagtgttttgcagcagctcacgccaatgaataaaacagaggtggtccataaacattcaagactagctgaagtaagtatgagatgaattttgcttcccaagatggtggtgttggtacatttttcttccctaaaatgatttaatatagatatttctggctatgatcttataaatacttagctgataatttatgtttcccttgtagaaatatagaaatcccaaatatttctattcattctctccaacttttgaaatgggagtgtagctcatgacatcccaggtcatgtctgtagagtgtaaggttttctttgagcatatcagatagggagttctttcattgcttcatgcatatatgcagcaaacacatattcagggtatgctctgtgcttggcactctgcaaaggatgtaaagttaaataagaaatgggccctgtcatcaaggagttaaatatccagcagaggaaactgatcataagatgtgaaaagatgcaatgacagggtgctgtgggagcctgtgcaggagaatttgcccaaatgtggggccctagggaaggctgtgtgagtgagatgatacctgggctgagtgaattctgaagggaaaatgtgagagctagtcaggtaaagaagggatatagtttattcctaccagggaggccagcatgtacaaagggtcagagatgaggtagtatggtgacgttgagtatgactttactgtagttgaactcatatggggaaggagaaggtagggtggcatatagtgaaatggtggtggttggtgtctcatgtgccaggaaaatgacctttgtgcctcagaaaaacctctcaaagggaggtgggtcctaattggtttcttttgcaatttcatgtttttattgtgttaattcaaaaactttattctaagaagaggtccatagtttttaccagattgccatagggatccaaggcacaaaatgattaaaaactcctgcttggcctagtggctctgtggagaatggggaggtagggaaaccagtgaggaagtcctagcagtaagtaagttagcatgaccacggttgtcagcaggatagtggtagcagaagtgggtggattgcagacacattaagattagagtgaacacatttgttaatacattagaatagtgtgtgaaacaaggggttgagtccaggacaattctatgtttttgatttagatgacagggtagatagttctgttggttaataaaatgacgaatgtaagatgaaggaaagaagatttgaggacaatgatcatgagttcagtttggggcatacaaagtttgaagagccccataggaagccctagtggagatgcctgaacagcagggagatttatgggtctggcactctggaaggatatttgagtttgaattgtaggcttcagtgtcatcttcacagttatggctgttcaagtcatgtgactagacgatgttaccctgagactaaggagaaaaaaaatgaggacagaactctgaggcagctaatagctttattgttcacatgtcttctataaccataatttgtattactggtatgaaagatgccaaaaagctcattaagctaccaaaactatgctgagcactacgtttgcactcacaaaatattctcaggtaacttttaccaaaaaagagaaagataaaatccatacgcttatcagttttctctgctgcagaaaagtgagtcgaagcacttcagagtaattttcttaacttgtcgtaaatattgaatctggtttggaggggattaggaagtaaagtatgttccctgaatttagaagactatggagtttttcttagaccatggctaacaaaaagacttttggttttctgctctaaatagcactgttagcttggggaaagatgaatcctttgatgtgcagacatgtttctgaagaccaaaataagacattaatataactaaatattaactagtaataataatcacaatatttaaaagataatatgcaattagtacaagatttaaagcagacaatgagatacaactttcttttgcaaaaatgcttagattttggagctagttcctcttctgcctaaagttgcctgtttctttctgcaaatcaagctgaaatgtaggaggttgtttctgtgattgtgaatttttatagtcatgattcctttggggtcttaaccacacctgattcaggatttttcttttgtctgttacacaacagagcgacaacaagtgaaagggggccatagagaagacaatcttctcccttagcacccagaatcactcagaattgttttttcactgtatcaacggaaaagaaagaaactttccccttgacattttctcatttttatttttgagaaacgtattcctatttcatcccatctgttttttttttctttgctctgtgattagtgttagtttctttaccagtcatcccttattcataaacctggttctgatataaaactgctttctgtcagatcttagggtcgatttcagagagcatacagaaataacaagattgtcgatagacatttagtctgaatacctgcagcgcatgctcttagatctccaaagatagacataaaagaaataccaaataagtataacaatgttgtttttccagtggtactcaaaactcttgtaatttgctcaatgcaagtatttggtttagctatggaatttgaggtgcttttactttttcaaagacagataaatttgatctcaattctacctgatcccccaaatttggagctgatccccagtttcaaagattccagtctccataaaggtagttaattaattttctgcgtgcattgacaccctgctgattgcctttagcttgttcacttttatgttgggtagagataaatatatacgccctgccacatcagtcagtgggcctgactttgttagagtcaatgctctcagatcttcagagaggaagaatgtgtctgtattggtacaaaaatacatcaaaaaatgtgatttcatcctccttccaccaaaggcttattgcttatagaagcacaaatgacataacaatgaaaatgaagagtctgttactgttttatgaaagagcccaggaacagagtgaagattagtagtgctttgcatatgaaaaagatgaagcttattttttgtgcactgttttttgttgttgccattttcctcttcttcctcctccttgtcctcctctaccctttcctcctcctttttgtccccatcttgcatttttttggagggctttacatatgcaaatcactgtctagagaattgggtcctgaatgtctaaagaaatgtaagacagatatcttaccttgggctgtacattgtaatcacctgggaaggttttgaaaatatagattctctgagaacccaaacaagaccaatttaatcattctccagggtggagtctaggtataagtatactgtattcttttaaaacttccccagatgattctaatatatagccaggtttaagactttctgaactcagggtgatgccattccatctttagaggagacctgcattaatccaggctactgagcagggcttacatctgtcagcacagtaggcacagtgtccagggccccacaacacttttacgggtctataggatgtttcaatttctattaacagcagaagaaaacagggtaattttaggtaaaaacaaaaactgaatgtgtgatattaatatatttatctgttataatatacacacacacacacatatgtatatatatgtatatatacatacacacttttttttttttttgagactgagtctcgctctgtcacccaggctggagtgcagtgagtggtgtgatctcagctcactggaacctctgcctcccaggttcaagtgattctcctgcctcagcctccagagaagctgggactgcaggcacgtgccaacaagcccggctaatttttgtatttttagtaggacggggtttcaccatgaaggagtctaggaaggcacaaaggcttagggtccacgaaggtggtaatgcaccctggtactgagtttgttcttatttcccaagtttgatttatttgtggttaaacatagactgtgtatatatagatggtaaactactaacattgaatatgaaggcaattttcatgtttaacacaatgaaattggaattgacaggccagtagttgaaaagcaaaagaaaagacatgattatgtacaattgtataatacttcaccccaacatgaatcttacctcctggtaggatgatttgctgttaagtaatttaagacatcatgggaaaaacataactgaggtactgataatggcaaatacataaaatatctttataagtattcttacaaacaccaaaataaaaataacaattctaacatacaattaaagggaccaccagtgatgttttccatatcaaaaatagtaaaaatggatattatattcttagttttcagatatgtaagttctgtatatgagaggaactttaggatactctcccaagctgccaaagatgctagtatatttgttttgttttgtggcatatattataactcagagttacatgctaacaagtatttttatttttatccattcttacatctaaatatttaatgcatttatgattttatgatttggcctttttgactcctaccttctgggtcccattagtcctagagacactgaataactgaatacatacaatgggcaaatctgttgaaaatatttaaaaatttccatttaccaaactctttaacacatacattgtctttggcttcattgatggcacagggcagaagtttttgatttatcccttcaactgtctttttttttttgagacggagtctcgctctgtcgccaggctggagtgcagtggcacaatctcagtttactgcaacctctgcctcctgcattcaagtggttctcctgcctctgcttcctgagtagttgggattataggcacgcaccaccacgcccatctaatatttgtatttttagtagagacagcgtttcaccatgttggccaggatggtctcgatctcctgacctcgtgatctcgcctcaactgttttttataattcccaggttccaggttccagaaggcaatgctatgtcctgtgttggttacctttgcccagggatacacaaacctctactcttgctctgtcatctgctttttatctttgttttctgctgtaattagacttaattagtgtaactcaaggttcatataaacttacactaaaatttttccatttgaattggtatacagaaacaaacttgagtatttaatatttttttccctaaaggaaatttgcagttgggcaagaaacacaatattctttaagtccagatctaagggaggaagggaaaaagcaggcgataccctttacaaccctttacactgctgtgccacccatcagggcccttgctgagtatcactcaacaacagcatcaccaacagtgggatgccggggtccagcgaggccatcagaatcaaagttatgcttcctgaggtgctaaatgtgtatgaagaatagataatggtgtctcacccaaataactgctggacagtccatgagagccatgtgattctaggcaggcttgcagagtgagtgtgcaggaggcacttgcagaagtggacatccagcagtgttgtggatcagtgttggctactgcatcagagcatgccagatagaacagcagaaagatcagctttggtagagtgattggacttggagtgacttcctctgaacaaattttaggacaactcaggagaagagggaggcaagactgtggagcatgactggctgtggtttgactgccagtagatttgaattcatcactgactgtgcagagataacctagtcatgtataaatacattttctctcttttaggttcttcagctgggatcagatatccttcctcagtataaacaagaagcgccaaagacgccaccacacattattttacattattgtgcttttaaaactacttgggattgggtgattttaattcttaccttctacaccgccattatggttccttataatgtttccttcaaaacaaagcagaacaacatagcctggctggtactggatagtgtggtggacgttatttttctggttgacatcgttttaaattttcacacgactttcgtggggcccggtggagaggtcatttctgaccctaagctcataaggatgaactatctgaaaacttggtttgtgatcgatctgctgtcttgtttaccttatgacatcatcaatgcctttgaaaatgtggatgaggtaagtttttcgttttggttttctgagtactgtgggtcatatattttgaaaacatcaggataaatggattccacagataatccaaacctctttttagccaccactttcaactttcttgaaacccttgccaaaagttattatatttgattaccttaaattagttttcatctgtttcttctccttgatatctggttgaaagtactaattactgggaattggagtttgtggatggaagaagtggaggagaagaaaagcggcggcatttgaagtcaactacagttcacaaactacataattgattgaaagaagatattagattggtgcaaaagtaattgtggttttcacaattacttttaatggcaaaaaccacatttacttttataacaacctaataaatagatgtattttctttgaaaagctgcagcatttgaaaactactcattcacagatcttttgactcctcctctcaagacacatatgataacaatggtagagttaacataaagataaagaaacttttatgaaacagcaattcttgaatttttgccactttggtttcttcctcatagcttttgctttacattttgtctgaatatatttgtggatattggatgacgtattagtccattttcacactgctataaagatacaacctgagactgggtaatttataaacagaagagatttaattgactcacagttccacatggctggagaggcctcaggaaacttacaatcctggtggaaacaagcaaggaccttcttcacatggcggcaggagagaaaaaggagcacaggggaaactgccacttttaaaacccccagatcgcatgagatctccctcactgtcacgggaacagcatggggaaaactgcccccataatctaatcacctctcaccaggtccctctcttgacatgtggggattaccatttgagatgagatttgggtggggacacagagccaaaccatatcagatgacttctgatgtcttgtctcatgtaaggctctgcttcttcagtgttatcagtgcacctagaagtacttaaaatatgtagaagcttaaaagaccacttcatccacagcttctcaggctctaacttaatagtggatgatatttaagttgttacaccaagctaataggatacaaccagtaatttcaattcataatatatagaagagtcaatatagaatatgtctattattaaaatatgttcattatgataatattactaacttaattatcctaagatgttcctatagattctagtctgtagactgctcagatggaaaattctttactctgttgttattattattataatacattgtaatatattatttctctatgtgtgttgggagatagattgaaacttttcttcagtgactttttctataaaatatttacgttcaaccaactataataatataaatattatttcccccaaatttaagtgtagacattgtattttgatattgtgtatgtaattattactttataaattatgagaaaaaaatcataataattcattttccaagttttgagtccacctacatcaagcttttaaagattttttttttcaaatttatcttctgaagtgagttaaaggagttaattttgaaaatacaaatcacatgataggggacaataagcagtatttatgttttgcacactacacagattattacattaatacattgagattttagttatttagagtataggcctaaagattttaataaaggcaatcactcatgtggaatctagaaaagttcatctcatatagagtagaataatggttaccaaggggtggggtgaatggagagatggtggaagaatacaaaacttcagttagatggaactaaattcaagaaatctattatacaatatggtgactatagttaacaatgtactacattctggaaaaatgctgagaaagtgggtgtaaagtgttctcaccacaaaaatgataactgtgaagaaacacatacgttaactagctagatttagtcattccacaatgcatacatactttaaaacgtcatgttgtacatagtaaatacatgcaattatttctgtcaattaaaaataatcaaaagattggcttgattagtattacagtaaatatattgtttaataatacatttataactatgtaatacttttatttatacatttataattatgtaatatatattaaaagattctctcaacttagctcatattcaagaaatgcaaagtaaatccacactaaatacaattttctttcttttttttttttttttgagacggagtctcactctgtcgctcaagcaggagtgcaggggctctgtctcggctcactgcaagctccgcctcccgggttcacgccattctccggcctcagcttcccaagtagctgggactactggtgcccgccacactaaatacaattttcatttatcacgctgcaaagaccgaaactacgttagaacactaggctgttgagtgtagtagctaagtaggcacaccgctcaaatctcctttcatcaacacgtgctgtgtggagtacggtcagcggcaccctgggtccagctcctggctttagaaagcctattgttaccatctcttctcgactcagcatttggtgatctcacagtggtagcttgaaattagccacagtgggcgtatttacactacagaaagtagcaaaagctacaaatcaaggcctttttaaaaaactttctgtagagctagttgttaatcattttccaacacatcactgaacacagttaactgaaggctgctgccttttctgatctcctgcagctcacatgttgaagctgggctcacacatttccccagggctcttccccgtcagtgtctgagtatggtgggaatactataacttgtccataactgcaacttttgctctgggactatccatttactgtgtaaaagtgtaagctttttcttcctacctgagtcttccttccctctttcacaggtgttagaactgcattgtagtccaaaggctcttcgtgttcccctcctccccattttgtccttcccaggcatttacctcagtaaaattcttgcgtaaataaccctggcttggcatctactccttacaggacctcaattgatcaagtgggatgtggcatatcactctcatacactgctcaggggagaatgaattggtaaaatctctataaagaacagttggcaatgtttcattttaaaaaagagaagaccctagaggcaaccattttcaaattttttcaggggattcttttattatttgcttccatgtcaccaaacaacacgattacatatctacctcttggtttgtcaattttaggttttgtctttgacttctcaacatgaaaggtgagattttagctcccctttctactttcgctcactatttaaatgcaccattttcatcacctcattctcacaatatatcatccttttgattcaataaatattaagtgttgatattattattattgttattattattatttttggtgacagagtcttgctctgtcacccaggcgagagtgcagtggtgtgatcactgcaacctctgcctcccaggttcaagcgattctcctgcctcaacttccccagcagctgggactagaggcgcgcaccaccacactcggctaattttttttaaatttttttagtatttcaccatgatggccagtctggtcttgaactcctgacctcaagtgatccgcccatctcagcctcccaaagtgttgggattacaggcgtgagcaactgggcctggccaagtgttgatattgttatgactgcaaatatgcattttatagctgatccttgcagcatgctgtaattacttttctttttctgcactttccatttttctgggagctgataactgtctgattttatgttttctatgttcttatcactaattcaaccacaaagttctctgacaattatctaaatctcccttcattacattgatgcaagaagtattctatcgatatcattttcttaaacaaacctctctttactctttcacctgattgatagttaagctagctataatattcttggctagagataattttccttcagaattttgaaagatacaatgccattgtactcctccagtaattctgataagaaacttgaagtcattacgatttctgttcctttacatgtgacctattttctctttctggaagtttcatacaccttctctgtcctaaggttctgtaactttctgaagatatgcttttgtgcagatctattttcatcagttttgatgggtgttaactaggtggtccttttcagcctggaaaagcatgactactgtcttgatattttttcctattatgattttctccagccctctgaccttttctaaattttctttctttctggaactccttttattcagatactgtacctatgagaccagtcctgtaattttttttttttttttttttgacatggagtctcgctctgtcacccaggctggagtgcagtggcgtgatctcggctcactgcaagctctgcttcctgggttcacgccattctcctgccacagcctcctgagtagctgggactacaggcgctgccaccatgcctggctaattttatttttgtatttttagtagagacagggtttcaccatgttagccaggatggtctcgatctcttgacctcatgatccacccgtcttggcctcccaaagtgctgggattacaggcgtgagccactgcacctggccaatttccttttttttttttttaaatctcctattttctaatcctttatctttttgctacactttctgggagatttcttccacgttattttctaactctctttgtccctaataatgcttttcttgcttaaggtctagtttgcttaatactattatagctaaatttgcttttgtatggttggtgtgtatttgatccgtatatttctggatatatattttatgagtagtgtatagattctgaaagtctctttaacaggcaagtttaatctgtttacattgattgtgattaattacgttttgatttacttagtacatcttattttctatttttaaatgccttttcttacctttgtgttttggtgttttctttttccttttgtttttccaggttttggattgattgaactttcctttaatctcttggattcctcctactggtttggaattttttctgttaatcgattactcttacatttttaacatcagtgtttgacttaacagattccagaagcttctaagtatctttacctttcttcatttgattcaaggacttctgttccccttcatctttcaaattattattgtcttttattttggatctacattatttttaattttttccttttaatatgtgattgttttattaatatttaattgtcaattcttatttagatttatccacacgtttatcggcttcttcattcatactattttatgcattctttgccttttttctgggtcagttcctatagattggctctttattaccccttattataacattcacctttctggaacatatttctttcaggaagcctgcctgcatcattcccaagcagctttaattaatatcttcaccatatttcatgttcacttatgtatatgtatgcgccttaatatagttaaaaatatttttttcttttgttgatttgtgtgtgttcataagcactatatcagctgttggatgttctggagtcttgtgccttgtctaggacatgtttgttttgagactttgagagggttactctggttctcagtttccatgatgtaaaacaaggaaaggagtgtatagctaaattacttatatcacaaggtgattataaggaataaatgggaaaagggatactaatatattttgcttgtagaattctgcaaatctggtggggtattattatttcatttgtatgtgtttgtttcctcagctggattataaatcctgtgatggtgaagaatgtgtcttccatctccttggtatttcttcattgctcttaaggcatactggtgacttattgacctgaagcagtaaaatgttagcaaggttttagtaaattgcacaatgacataaaaataaaatagaacttagacctgaagaggaagtacattaatggtgacttgggaataagaaagaatatgagtctgaaaattacgatataatccttttacatgatgtaagtgcagaatgacttagaagacttaataacgttctttattttcaagattgtcgacacgctctctgaaggtagtttggtttactaggaattcatgaactgaatatgtgattctttaagaaaattgtgaggcagaaaagacagattccattaaagaaggcattctgtttgaaaagaaggaacataaattttctaaaagctgtaaacagagggtaaaagaatgttgtcactaagaatccaaagaataggattgagcttctttgtagtatgcatttgaatacagctttgggaggttcagggagcttgattttggggagattagagggagttgagccatagaacatcatcaaagatggagcagctgcagataacacgctgtttggtagcataggaggattcaggaaatatgaaacatggggaattttgatgataatgagtagtcttaataagtgataaacataaaaactaggtcaaaaatgaaattgggaaaagataactcatgcattgctttaggagaaagaatgaatagaacaatgactgctaagtggaagtatataaatacttttaattttcagaaaagtttatggaagataattttctaaattattgttttgtcatgaattatgcttgtcaagctgccacatgcatcatttcactttatcctgtataattacgttaataatttttatttctgatctagtcattaaaacaagaacaggaaatcaggaaggctaattatgcttctagacttcagtaacttctgtcagcttagaatcctctttttcccttttgcttgccatctcagaccttctacaaagaataacatgttagaaattgttatttaatatagttggcttgccattaccttttcattaaagtgtatagataatttaaaataatacttcagtggtataactaggatatacctaatttttctgtttgttttcctagttttaatcttattaaatccatataaatactgcctgtctaagtttgttatgtgctgccatagcaaaataccacaggttgggtcatttatgaagaacaggaacttatttctcacagctctggagactaggaagtccaaggcactggcatgtggtgtcctgtgggggctgtcctcacatggtggaaggcagaagagcaaacaagacaaatgtgtcttcatgtagcagaagacagcacaccgcttctgcaagccctttttatagcagcattaatccatgcatgagggcagatccctcatgacctaaatacattctatttgtcttcatctcccaacattattgcattgaggattaagttttaacatatatatttgaggggacaaaccaatcaaaccatagcgctacccaatccttcttggaattagttgatttttcttttcactgtgattcacagctgatgatagcatgccaacattaagtcctaagcaatctgcttttaaatctaactttgtaaagagtgtgagcctttttaaaaatagactttaatttttaagaccgcttttaggtttgtagcaaaattgaggaggtgcagagatttcccatgtactgtaccctttgctcccaaacatgcatagattctcccactatggaaatcccacaccagagtggtacatctgttacaattgatgaacctacttgaatacatcattatcacccaaagttgatcgtttctagtggctttcactcttgattttgtacatttaatgggtttggacagaagtatgatgacaagtatcctccattacagcatcacacagattagttttactgtcttaaaatttttttcatgctctgcttattcttttctccttctctgcttatccgtggcaaccactgatcctttgtgtctccatagttttgccttctctaagtgtcatatagttagaatcagatagtttgtagctttttcatattggcttctttctcttagtaataggcatttaaggttcctctgtgttttttcaaggcttgatagctcattttttttttctgtgctgaataacatatcattgtctggatgtatcacagtttatttattcattcacctactgaagaacatcttggatgcttccaagttttgcaaaattatgaataaagctgctataaacattcatgtgcaggtttatatgtggacataagttttaaacatatttgggtaaataccaagaaacatgattgctgaatcatatggtaagactatgtttacttttgtaagaaactttcaaactgtctgttttccaaagtggcagcaccattatgtattcccatcagcgatgaatgagaatttctgttgttccacatccttgccaacacttggcggtgttagtattttggagtttgactattctaacaggtgtgtagtggtatctgtttaaatgtatctcttttgatgttttaaaattttcaattgacaaatggcatatattgctgaacaccttttcatatgcttaattctcataggaatatcttctttggtaagatgtgtgttcagatcttttgtgcatttttttaattgttgttttaagagttctttttagtttttagatgatagtactttattagatgtcttttgcaaatattttctctcagtttgtggcttgtcttctcattcttttgactgtgacttttgcagagcagaattttacattttaatgaagtccagcttatcaattattactttcatggattgtgcctttggtgttgtatctataaagtcattgtcatactcaaggtcatctagattttctcctgtgttgtcttccataagttttatagttttgcattttttattttatatgattcattctgagttaaattttgtgaagggtgtagggtctgtgactagattcacttttttttttaatttggctatccagttgtttcatcactattttttgaaaagactatgtttgttccattgcattgcctttttgcctttgtctaagatttatgcctatatttatgtgggtctattcctggattcactattctgatcagttaatctattgtctattttttctccaataccatactctctttattgctatacttttatagttagtcttaaagtcatatagcatcagtcttctgacttggttcttcaacttccatattgtagtggctattttgaattttttgcctgtctatataagctttagaatcagtctacttgtatcaacaaaataacctgctaggttcttaattggatttttgttgtctctagttcattttgagaagaactgacatcttgacaatattgagtcttactatccatgaacatgaaatatctcttcatttatttagttcttctttgatatatttcatcagttttgtagttttcctcatagatcatgtgcacattttattagatttatatttaagtattttggggagggctaaagtaaatggcattatggttttttatttcaaattccacttgtgccttgctggtatacagaaaagcaattgccttttgtgtattaaccttgtaacctggaaccttgctataattacttatgagtttcatggtttttggtcaatttattcatattttctacatagataatcatctcatctcatggataatcatctgtgaacaatgacatttttatttcttccttcccagtaagtataccttttcttgttttattgcattagctagaatttccatgatgagtttgaaaagaagtgatgagagggaacatctttgcctcgttcctgatcttaataggaaagcttctagtttttcattcttgagtatgatgttagttgtagggttttttttttcttttttttggtagatgttctttatcatgttgaagaatttcctctctacttgtagtttgttgagagtattttatcatgaatcgatgttggagttgttaaatgatttatctacatccattgatatgatcatgccattttcctttagcttgttgatgttatggattacattaactgactctcaaatgttgcaccagctttgcatacctagaaccaaatccagttggtcacagtgtatactttttaaaatacattgttagattaaatttttttaaatcaaatattaacaaaacattttgttgagaatttttacatctatgttcatgagagatattagtttgtacttttcttgtaatgtctttgtctggttttggtattggggtaatgctggtctcataaaatgcacaagaaagtattctttctgcctctaccttctggaaaacattggaggaaattggtataatttattccttaaatgtttgataaatttcacttgtgaacctatctgggcctaatgctttgtgttttagaaggttattaattattgatgcaatttctttaatagatgtagttctattcagattattttttttcttgtgtgggtcttagcagatgtgtctttcaaggatttgatttatttcattatcagatttatcaaatctgtgggcagagttgttcatagcatttcttaattatccctttagtattcatggaatttgtagtagtgtcccctcttttatttctaatattagtaatttgtatcttctctctctcttgtttcgttagcctgactagaggcttattgatttaatttttttttttttttttttttttttttagacggagtctcactctgtcacccagtcacccaagctggagtgcagtggcgcagtctcagctcactgcaacctctgcctcccagcctcaagtgattctcatgctacaggcgcatgccaccacgcctggctaattttttgtatcttgatagagacagggtttcaccgcgttgcccagggtggtctcgagttcctgagatcaggtgatctgcctgcctcagcctcccaaagtgctgggattccaggcatgagccactgcgcccagccaaaaaaaaaaaaaaaaaaaaaattaattttattttaagttctgggatacacgtgcaggacaggcaggtctgttacagaggtaaacctgtgtcatggtggtttgctgcaccaatcaatccatcacctaggtattaagccctgcatgcgttaactgttcttcttgatgctctccctccccgtccctggcagccccccatcaggccccagtgtgtgttattcccctccctgtgtccacatgctctcattattcagctccgacttatgagtaagaacatgtggtgtttggttttctgatttttaaaatcttttcaaagaattagcttttggctttgttgatttttaaaaatttatgtcctattttcaatttcatttatttctgctttaatttttatgatggcttttctttgacttactttggatttctggtttgcaaaggtgaaagtatagattattgattttagatttttcttcttttccagcatatgtattcaaagctgtaaatttccctgtaagcactgattttgtgatctcctatcctacgcattgttaaattgtattttcattttcgtatagttcaaattattttaaatttcttttgagatttcttctttgactcgtgttatttaaaagtgtgttatttaatctccaagtgtttgggtatttttcagatattgttctgttattgatttctaatttaattccattgtgacctgaaagcagacattgtatgatttctattcttttaatacatatagtgattctaataacaatttgaaaatcatttatatttatattggatttatatttatattgagtattggattactcgtctttcatctataggctcagagaaggtgtgttggtgaccctatttggcatcctttaattgtacttcaggtaaataattcaaatccagcaaagatctttagagagctaatggttaggtattatgcttgtttctggaagaatctccaaagcagacactctgtctctctaactcatcttggatttgtatacctaccaagatgcctgacatctaattgccagcctacaaatatttctattgaagtgaatgaggcataccacatttcctaactatacatgctttttgttaataatgggaaagataaggccagagggaaacctttgtgacataatcttagctgtgctctaaactctttcttctcacagactatagggcatatcctttgaccactatgttcacatttcctctcatgagttgctttccatgagtattcttttgctgtcatgtaaataatcctccagtcagatgacctaccctaccagctttccatacatgtttaaggattaccctagggttaagcctccaagctgtgatctcccactgggagtgcaaagtattgtggacaaataaatacaaataaatacaaagatgaacaagacacagtctctgaacagatatctactttctactttgagggaaagactttctcacaaactatttgcaggtgtaaataaaagaggggtcagggtgaaggaagagatagggaaaaaatttggagaaagggtaagagtcagcctcaagttccaaattggagcatgatggctgtcatctaagcttttaaattctattcctggtgggcattggtagagaatgttatcatggttgggtaatacacagctttaaagatagacttccttagatttgaaaagtttggtgatgttgcaggaacattcttttgcatgaatttccaatgagacaaagcagtctgtctaactgagggaattagctttgagaggaaaggaaataacaagcaatgaggatagcattgagcttcctttatttgattttcttgtttacataaaaatttttttatctgtactgatcttcattcatgataaattgttcctattgttaagcatcaggggatgattctaacatagaggcaaagaaggttgaaatatattggaatttgtatgttacagctaactcttaaacagtttttaccttaactacttatgaatacttgcatagaggttactgtttattgtctttctgtgcaataattatccccatgcttgagaaatcatagttttgttactctgcttttggggaagctccagtggagttcatccctacttcatttagcctttttaatacttcattttattccctaatgtccctgctttcacacaacacacactaacttataaagaatatgtttgtctttgtattgaatttcttcatctttaagaagtgttgtttatatttaggtaaagggttaacaaaattattttttcttctgcttgagaatttgacctttggctagcagtcttcctttgcttccctgggaactgatgaagggaacatgtcatttatgtttctaggcaatattacttatgtttagaaaaaaagggctgggcatggtggctaatgcctgtaatctcagcactcagggaggcagaggaaggaggattgcttgagcccaggagtttgaggatagcctgggcaacatactaggaccccatctccacaaaaaggaaaaaaaaattccctcatcagtaaattgcatctagactgtgaggaacttttaataaactataaataacttgataaggacaccatagcttatgggttccttgaatgatggagctttcagagttccatcagatatgagcatatctcttgtgggactctgaaactgcctgtggcattgttattagaagtattagattaggtagagcatgaggctgtcaaaagctacatccccaaacattaccaacacaacctgttaaaaagacaaagctgagttgaatttattgcttaccacggtaaaagggaacactgccatgcaaagctctagtagtgtactcagagcaggaaagaaaaggacagaatggattaagaatcgaaagtttgatataaggtaggtttttaaaaacagggagtggctaggggagtgggctttattagaactgggtaaagttcaagaatatgatacaatagcacaggattggaggaaacagcaaggcaaggattttgaaggaaagaattcaaagaatcttaggacataaactgtctgcagatacttttcactaaagagttaataggtctttgcaaagttcgtgtaataaaaaaatcaaaccatttatctgagcaggagagtcctggagaaagaaggtcctgctaagggagacagaacaatagtccaaagtcgtgttaatgtagacagtaagatagagttttagttttcagtgtccagaatgagtgagagtagtggtgatggtgagattagactatttctcaaggcttttaagtcaagatggctccagtacttgctgactgagtcttattttctcacttttaagttgtcttcttggggagactggggacagggagcatagctctttggactgctacacaaactactatgaggtctatgcccatggaagaggatgctaatactgcccttttgatgagcagtgatttctattctgtgcccttctgagtctactgataaataagcatgatcgatgatagtagtgtttgaatgtttagttgatcagtattgcagatacaaatacagagtttatgatcaaatgcccagtgtgcactttcagaagatgctagtttccattgtcatttgtttgtttttgggtaattgtgtcaggaaaaatcagtcatcttcagttacattcacatttatacacaggattacactgagttgtgaatggccttactcaaaaacttttacagatgttgcaattgtcctggtcacagtaaattaagaggtctatatcatggaaaccagtgcaaaaattattttaccatagattacagatttttagatttgctcaattttatgttcaatatgatgctactggaattttagaatcacttcttcttgtcttcaatattgaaatctaacaagttttaaaaaagaacatctatttaatgacatcttacctatgatggcaaagaaagtaattatttttaggaaatacacagtatccatgtacagaagcctgccagtacatatggtaaacatatcactaggactgatcactagatcaattgttaaatttctgctctttagtgttatgaatgactgtgtatttggtttgacttctgaggtgtggtggtacattgagaaatatacagggatggctctcttagtccattatgtgtagctataacagaatgcctgaggctgggtaatttataaagaaaagaagcctatttagctcacagctctgcaggttaggaagttcaagagcatggccctggattctgatgagggttttcatgctgcatcataaccttgtggagaaagtcaaaggacaagcagacatatgaggagagacaaaacccaaacagtgtcctggctctagaaaaatctaccattgcaggaacttatccattcctttaagaatgaatccagtcttgccagagtgagaactcacccactaccatgagaatggtatgaagacgttcataagagattcactcccatgactcaaacacctcccactaggccccatgttccaacactaccacattggggatcaaatctcaacttgagttttggtgggacaaaccacatgcaaactacagcaacgacataagaaggatttattcttctctgaatgtcatcctttaaatgaaaaaaacaaatcccttacttgattttatgcatctattcacctctctctctctatatatatattgaggtactcctttattataagtattggggaatctggcagtgaacaagcacacaaatccttccctatcttcataaaactgttaaagagaaattgcaccagacatttgttgaaaacaaagactttattcaagaccgttgcaatagtagagagagatttttgcactaggggagagggattggactcaactttgttgaaacaagtgtagagatgttggtcaatatgattaggtcatctaatcatttgataattggtgcttatcaaagtttgacatctaccctcctacagacattaggaaatagaggcactatctttcttgatgattatattccaaaggaatagcccacaagtctttgagaaagacattcctgggttataaaattggcaagaggctgggagattttcctctgaaagaggcagagaaagaatttacgatagaaagtttcttaaataaatgttctaagaaaagggaagtcaggatcctagacttaggaagaagccaagttaaggtcatcttggtcagagttaatattctggtgggggaaaaacagacagtaagtatatgtggacagtttaaattgtgtgtgtgtgtgtgtctgtgagtataatttcagctagtgatatgctctacaaataaaaataatacaggggcaataggatatagataatgactggggtgatgaggaggtgaacatgttggaaagcatgtaatgggctaaatgccgctgttaggttaggatttctttttagttgcaaaggaaagagattcaagtgacctcaagtgatggaagatttagtataaggatggatatttttcagcacatagcacaaataacagtggtaccttagaacctaatgtatggccctagaccaagattgctctggggaacttggcccaaggcagagccaatttctaatattagggaagtgagcctgaaaaaaggaaggagctgagccaaagtatagggaagtgaggaaaaagaaaatggagctactctttgaactccttcttcatgtatctcacagtctttcattgacattgttttctccagtatcattttcttatagccttaacattccatatgatcacatatggtcattaaaattgttgaaaaaagggatattttagaaaattattttggaggacatgactgcttactgttctagctattttcttagggtttgtagatctttagttgagtttcccaccactaatgtgactcactgactctgtctgtatgcttttctctcttgactgaatttcttagcatgcttgttaatttcatctcaacttaactggaccttggggtattcagattacacattgttactgggtgtatctgtttcttgctgagaatagcacttggatcagtacattcagtaaagcagattgttctccccaatgtggatgggcattatccaatctgttgagggcctgaatagaaaaagagatggaagaaggaggaattctctccttttttctgccttactacttgatctggaacatctcatctcgtcttgcttttggactggaatttacaccattggcctggttcttaggtctttggacttgaattgcaatatcggctttcttgggtctcctggttgcagatggcagactgtggaacttctctgcctccataatcatttgagcccattcctcacaatacatctctctctcttcctaaatatcaacatctatatacagttattcccttttacccatgggtatgcattccaagacccccagtggaggcctgaaaccacagatggtactgaaccctatatatactatgctttctcctatacagacgtacctatgataaagtttaatttataaattaggcacagtaagaaataaacaatataacaacatagaagaattactataatgtactgtaataaaagttatgtgaatgtgtttgctctcttccaaaacatctcattgttactatactcaccctttttcttacgatgatgtgagatgaaaaaatgcctacatgatgagatgaagtagggtgaatgatgtaggcattgtgacctagctttaggctactattgaccttctgataatatatcagaaaatgattacattcttcaggtgatcctggatcatcaagccatgaacattaatggttgaatgtcaggagcaggagcagataatgtcaatattagggatccttgatagttgaaggttattttttgctgaaacctttgggaagaacactgtagttggaaattattgtctcttttaaactcattaaaatgttgctatagaaattgtattccttcattgatcatataggagactttagtgctttgtttcatctgtggatcatattccataattctgtccattattgtctgtacaatttgaaacacttcagcaactttccatagtatccacattgctagttctgcttcacttcttcttcctctgtaggtgactcaacaagttcttctagtttctcatttgttagcacttctgatgaccttcaatatgttcttccacttcatcaagtatgttggcatattcttcttcactaacttgtcttgctgtgtgaattattttcttagcttctccattgatccccaggaagcctttaaaatcattcatgacttcaatccataagttcttccagcaggtatttgcaatttctggttttaattaatccattgcagttttgatgaacgctgttgcatcagagatagtgaatgatttccagcatttttttatatctggattagggtctgcattaattgctgatcaaatgcaatcaaatatcaggcaggtgcgtgtggcactgataaaccaaatgatgtcctggtcaaagggctgaaacaaggaggttgtatttgaaggtaaaaatacaacctcaacattttcattttcatagaagattcaggatggctgggtgccttctcatctccatctccatcttcatctccatccctgtccctgtatccatctccatctgcacgtccatctccatctccatttccatctctatctgctctccatctccgtctccatctgcatctgcatctgcatctccatctccatctgcatctccatctgcatctgcatctctatctgcatctccgtctccatctgtaactccatctgcatctccatctgcatctccatctccatctccatctccatctgcatcatctccatctccatctccttctgcatttgcatctgcatctgcatctccatctgcatctccatctccatctctatctgcatctccatctccatctccatctgcatctgcatctccatctccatcagcatccccatctccatttccatccccatccctgtatccatctccatctgcacctccatttccatatctccatctccatatctccatctccatttccattttcatgtccatcatgtcctgttagtcctgtttctctggagagccctgacaaattcacttagtctttcttctcttttgctttgtctctttgcttacatagcccatcatggccacttcagtcttactctgcttcaactctcattgcctgttacctcattccctcagcatttcttggactaattatttatgctataaaacaagagtcttaactttcagggttggggatagttaggagaagtgtctctgagggggttacatttttaagcccagtcctgagagatgcataggaattcaccagacaaaagaaacggttggtgggtagggagattgttttaaacagcatgtttggagatctcctaggtgagaaagaatatatttttaaggtaggaaagaagtcctatatgacagagtgtagagagcagaagacagatgctcaaggtgagtctgaagaggtaggcaggggtaggttgtgttaaggagtttgggttttattctaaaggcagcaagaaattattgaagaaggatttaaagcatccccaatttggtttgcttgtacacatatcataatgtttggaaaaaaatcagggctttaggcaatacacctcttcatagggtacatattttgatcaagctttatattcactgtggacccagtggatatgaaaatgaaagtcttttctacaaaaagaagcatattaaaagttactacattatggatattgctgaaaataagtgcctattctttgtctgtctgtctggccatttatgccactgtgtttcaattagaatatgaattggctaatacaggttttatgcacaagttatttaaattcagatcttctacagaaggatgctagctaatccatggagtaattaggattatttccccgtagagctcttggtagcttgagttggagcagtgaattctgaataggaaaaagcaatgtaacttgttatctgggttagaggttcagataacaaatgtagtttgcaattttttttctgtctttaaattgcactctacaaaaggaaatggaaatggactatgtaatcattcatgtataaaatctatttagaataagggcccaatgcttatgaaacagagcttattactgttttgtggtttctatccagttgcctgatatggtactacctgtgaaaattaagcagctattaattattgattatggtatcagtgctggaggaatcagaaattattatgagagatttatatattggttaggttattctttaattaatgttttcattctttaaatcactaggttcccaagagtgctagagtgtgctagggataaaagaatgagcaaaacatgatacacatgcacaatcacaaagagacaagtgtcatgaagggaatgtacatggtcctttgagattatataatgaaatgacctgatctagatcagaaagtgaaagttccctaaggaagcaataactgagctataatttaaagtatggatagagccaactaggctgaggaatgggcaagaaagaattatagaacattccatttacaaagaacagcaagtgcataatccctgtgttcgagggagaatgacatattcaaagaattgaaaattggatggagagtgagcagaagagaatggagctagagtggtaagcctggacccgactgtgcaaggctgtataaacaaaacagattttagaacagtgggaagctatgagataattttaaactagcagtgattttgaagaggtaactcttatgcagtgttcagaacagattgaataggtttaaacaaatgccttgacagttaggaaactcccgtagatagaggagagagatgctgttagtgtgatctaaggtgatgacagtggaggtggtgagaggtagataaatttgagagataggagttaaaattatgtattgataaaaacattattactacaaatatttaaaaataatggaaactgattcagaacaagtttcaaaatctaactaccagtttgcaggaaagtgggaggacagaggattatactagtgacaccataatgatgcaaacatcagaattcagaatttaggaaactctataagacaaacaatctgtttttttatataaataaatttgacttcaacagattaaaaaaaggagagggaaatgtgtagattaagagacacattaacaaagcacaaagtgtggaccttctttggtcctaattctaagaaaccagctggagagagggtgggcattgagtggactggatatttgctgattttgagaaatcatgttaggttttatcaggtgtgataatgggtgatagttttgttgaattaaaaaatatgttgtcttttagagacataccctgaaatatttatggacaaaattatacattttggatttgcttcaaaataatccagtggggccaggagtttgctgttaaaagagagatgtagaagaaacaagggtggtgataagttaataattactctagccgagttgtgggtaaatgggggaattattatgctatttacctgtttttttgtatgtttgagtttttccatgataaaatattgttctaaaatgaataggattttaaggtaggttgggtgaggtgatgttagagaaagggatggcaaggatgcttcttggtttctgatttgcttagtcacatagctgatttaggagggtgagggggtatgttaattttttttgcttaatgagagggacatgagatgtttaaatatctatgggaaaggtgtagttgaagagggtatggatggagttttgagtagagtagagaaggcttgaaatatagtgagcaggtaaatttacaagaaaaacaggaaacttgctaggtagttgacagatgcattgaaagtgatggtaatgaatttatagtggaacccactgtataactgtcttgagcagttcataatacagttgtgaagaaagctggtaattgagccaggacttgaattttgatagtgggcataatgaagagacagtgatgctaagcaatttagggtgttgatgttattgaaattatgggattatataagaaaaaaggtagagaatgaagagggttaatacattggggaaaggactacaggttcagtaaggataaactacttttgcagttggtgtaattgggccattgatcttgacagagaagcagccatgatcagatagcaggatgattcaattcaaaatttcagagctggagaaagttttggaatataacaaattttagattttgatcatgaaagtgggtgtctgaggagaagtagaaaggttgttggagatggattggtgaagaaactccaaggccaggctattggaagtctcacctccatggatatcacccaaggtgatgttaagttttaggtgagattggcttttagaaatatttataagatttatgaagtaataacttggagttctttattctcatgaagtatttgttggcgtcaatccatgcaaagcataatagcgacatatttctgaatataacagataaataacacccaacaattgtatattaaatcttactttacatacccatatctttcctatttgggataatgttgtattaagatgggacctctctattaacgcgatatctatattgccccagtgttctgtcctagaaatatgaaattctgtgctcataagcatgtaacatatgcacttttcttacatttttatcagttatcttttttcctgcatgtcaaataactctaaagctttatagataatatccaccataatttattcaactcatgagtctgcagttcaattgggtggttctgctgatttaggctaggtttggcttatctcaactaagtttactcatgcatctgtggtcagccgctgagttggctagggcctgagtagtctaggatggctgaaatgcatgactcaaagggatgcttctgtggtctctcatcccccaaagcctagtgagtcttgttcacatggcagctgggctggcttccaagaccacaggtggaggtggtgtgcaaggccttttgaggcctaggcttggatctgctgcagtcatttatatcacattctgttggccaaagcaagtcctaaagtcagtctagatttaagagataggaaacagaccctctgtcttgatgggaggaattataagtaacattgcagaggggtatggatacagggggaaaaataaacacagctatgtttttgaaacaatctaccagaacattgtattgtgagaatgcaaagtgtaggtgcaaaatcatgcaactgggtatgacaagtctgtattcctgctctttcatctccacttaattgcaacgtgtccttggacaagaaagttgaagaaaataggaaggaatattggctgaattatctacctgctattattagcgacggtcagataagagaattgatttgtattttggatggctttatcattgcaagatattattttatgctgataacatctcacatctctttaatgtggaatccacaaaagtgacttgaagggttaatggcacagaggtgtctcctggatactgttccttgtgctactatggcctgaggggcttgtcaagtaaggaaattggctagaaaggtggaaggctgatggctgaaagtcctccattcaccctgttgtgttctgttatgcacttgatgtatttgatattctgttccacagtggaacctcagggatttgtgtactaatagctcagaggctgggatagaggcagaaagccactgaagtgcagaggagggcacagaaagattggaaagtttggagtgaaatgaagcagaaaatcaatgaatatctaagactggtggaaagtacagcatcaaaacattgttataaaaaaggcagaagtacataagaagggcatttttggaggatcaacctctaaaactgtctagtagtatcatataagtgaaattaaacttgccaacaggaattaaatgcaattcgtggcccaatctaaaggttatgagagtgaatcataaaataaggaaaatctcttattttagatacattgatagctatgactccctgcccccccccgcccccaccaaatatcatgggatgagtaagaaattattaatctgaatcatgtactgtggtgaaatgttagcttaataacacatcagtgactattaggttttccataacatttttttgatgtttaaatatgacatatttaaagaaaattatcccaatcttaagtgtacagcagaaagaattttcacaaagtgaaccacctagtgattagtagctgtgttaggaaacaaaatactgccagaacccgaaggtctcctcatgccttttgtaatcactgcccctctcccaacaaagggagacactatgctcatttaaccccatggagtagttccatctgtttctgaactcttcagaaatggaatcatacagtatatactcttttgtatctagctccttttgctcaacatgatgtttgggggcaaaaaggagtttggtttgattggagcactagggctatgcagaggcatagagggaaatgacctggcagcatagacagagatgggattgcgggcattggaggcctgttcaagagattatgcttaatgtctgtgataagcccttggacgatatgctcagtgctgcctttcaggaagattaatattgcagcaatgatgtaggagagattgggggtaaggacaggaaggctgcagcgtggttggttgttgtgggaaatgcactcagaatctgaaggactgggtctgagtgatacttctgttccttgctaactgtgtctttggacgattcgttcaacctgtctgatcttcagtgtcctcatgtgaacaatgaaggtaggaatcctgctattataaaaacaaaatgaattgatccatgttagagaactgcagactatatagatataagagttccagggcctccacggacccctactgcgtggccattgctgtgactgagtggagggaaagaggaggctaggtatttaatctactttattcagtcatgtagagaatgctcatgtttaagccaatattgcaggtattcatgtggttggataagttacacattatactctaggtatagagactttcagaatgaacgaaggaaaattctggagacagactgcctgaatgtgaatctggcttcctcctcttactatgtatgtgaacttagtccaattatttttaacttttctgggccatgctttaatgataggtaccacataggattgttctgaattttaatttaattaatacaaagaaaacacttagaatagtacctggcatgtagtaaatactcaatgttattattgccttgtctgtcttttccaagtagcaataaatgacctaactttctgttggttaactgcatagaagtgtgtggcacaggcccattgaaatcctgtttgcatccttctatccctgtagctccagcctttttccaggttacccacattaggattatacagagtgagctcagccctcatccatgcactgtgtatttgaatataaatagtgccctgctccaatctccctttttccagttcctttcacatttcctaatagagttgagttttgaggggtttttttttttttggcagttctctgatgaatatattcaactgatctcctacatgtgtgacctagtgatatggtttggctgtttccccacccaaatctcatcttaaattgtagcttccataattccgaggtgttgtgagagggaccagttggagataattgaatcgtgggggtgtttcctccatactatttttgtggtagtgaataagtctcatgagatctgctggtttaataaggagtttctccatttgtttggctcttattctcttttgtgtgctgccatgtaagatgtgccttttgccttcctccatgattgtgaggcctccccagccgtgtggaactgtgagtccattaaacctcttttcctttacgaattaccgagtcttgggtatgtctttatcggcagcatgaaaatggagtaatacacctagtcagtgtagagattaaggagaatttctcttttgtactcaatgacatactctattaatgcaaccctaagttacattgactgttttgttctctacattatactgttaaatcattctgagtttgtaattaatcaaagccctccaaattgatccccaacatttgcttgtttcataaaagtttattctttcatttattgaattattggctgcttaacatattaccatatgccagctttgtaattgacagtagatctgctccttaaggagtttcctggaatgtcatacatgcaaacagacttgtagtaagtgtgacagtgaaaattgttataatagagatgtgcagaaactgtatgataacataaaggaaggatatcgaattctcccagtgggggacgggggagagtatgacaataaagatggcagaggcagggagatgatgtcagggaagtgcacatggaagagagagtatttgtcataaactgtatgtaagatcctaaccactaagagtgggggaaggaagcctttaaacagagagaataacttgtaacgtagcatgaaacagcatggacattctgggaactactcctatctgagaatggcagcagcctagagaacaggtggaggaattggcaggagagatgctgagcaggtaggtaggtacaaggtcctgatgggcttcgcgtgtcacacttggaaattaatatttattcctataggtaatgagccaacatgaaaagagtttatattagagagggacatggttagacagttgtgctttaaagaaatacgagactgatagcccttgtagtgtgatctgtgaattagaggaagcaagaatggaggtgggatggctgatggagaggcagttcctgtcacacaagtgagaaaaaaccaggaaatcatgaccaaacatgtctatgggaatggaagagaaggaaattttttgagagatttattaaatagatatattttgagcatttaggcactttgagtggtgagaccctcaggacttgataaccagctacatgtggcaggaaatgggaaaagttgaggcttcgccccaggtctgagtgactgggtggataatgatgtcattcacatgatagaagataactgatttgggagaagcaaacggttccctttaggacctatttttggatacctgtgggacatccaagaggaaacgcacggcagacatttggcttagtatcaataactcaggagagaggtttctttttgtgctaagtggacctgagaatgattcatatatggaagatggttgaaacctagatatgcagtagatcaaccagaagaggactgagggcaatcatgagaatcctaacatgaaatagaagcatggagaaggatagccctggaaagtgattttgagagggcgtcagttggagggttggctaaaaaccaagaggaagtagtgccatagaacctatggcagagagagtctataatgcttgatatatatgtgtatatattactaatattttatatatactttatgtatatatatcaagtatgtatatttactaatattttgttactttttaagcttgtaaaacattttataatgtttaagtggtgtcaaactacttctaaacctgtggcagagagagtctataatgctctctctctatataaaactgatattttatatatactttatatatcaagtatgtctatttactaatgttttattgctttttaagctcataaaacattttataatatttaagtagtgtcaaactacttctaaatattagaaaatgtgcttttgagtaagcagaatccagagcaggcctgtcaggatggtcacctccttttggagcaatctgcttgctagagatgagggatgtgtgtcttcccaccatttggacctcattctagtaggtcctaactcatgacattctagttggggtttgtgttggctttcttagtttgaatggggtgaagattttctctctgtttttccttctctttgctttaagctattttcagagaaaagaattcaggtagaaatgacttttctatgcagtatttaaacagaagtcccaaagttcctttaaaagtttgagctaaccagaaaatattatctataacatcattgtttttatttttaaactgaactctgtttgagtttttcatgtatttcgattatgcgtttctttagagcagaagtgaggcatatttatcttaatatccccagggcttaaaacagaacttggcatataggagtgctccataaatgtttatttttgtattacttgttgatgactgcactgttccatttttgaaagctttcaagccttccaacatctcatgtcactgaattacacaaatttgtcttctttatttcattaattctactctttttaactgactaaagtttagcatctttttcccccaagtgttaaagtgaaatgggaatttgtttttaggctgtatatatgctacaatatttgagagtttcaacttaaatagaggtaggcctaaggaaattgaagttgaggcagaaacccagcaggatgaccctgctactcctttgtttctatagggactcttgtttctacttctctttgttatctttctcttttaaattttcattatgaaaaatttcaaacacatgctgtcttatagaatatagtataacaaaccagatgcattcttaactgtttactttttttttttttttttttttgagacggagtctcgctctgttacccaggctggggtgcagtggcatgatctcggctcactgcaccctccgtctcccaggttcaagcaattccccctgcctcagcctccaagtagctgggattataggcacccaccaccatgcccggctaatttttgagtttttttagtagagacagggttttgccatgttggccaggctggtcttgaactcctgacctcaggtgatccacctgcctcggcttcccaaagttctgggattacaggcatgagccactgtgccctgccaactgtttccttcttaactgtcaggaactttaacatgcataattagagtcttattaatatacatctattctactgcaacaacaaattcctccttgctggtcagaattcatgtcagagtaagttatattagattccttgtctacattctgggagacagggttagcagtaaggaagtcatggatacgaatggatttgcaggtaatgactgcatgagaggcttcctggatcactgctccattttccctccctgcctattttgtgaactgcatcaggaatgaacttatcctacctctgcaggtggtctattacatgcttccaaaaaagtaactatgggactttcattgatttaagaaagcctatgctgtgctttgatttggataatcccttatttgttattttaagcttctcaacaaaatatgaattttccggctgctgttctttttttggtgttatttttggtgacttttgctagagaatggataggatagtaggccacacacccatttcaggttcagctctgttcacgttttcagagctctagaaatgcagtgattctcatgattgtggcaggaggtagtggggccaacaatggtatttgttcattttccccatatataccaaagtatttcctgtgtgattgcctgtaagactgtgcttcctttttcagagttctgctatttgtagctatcataaaataagaaatgaaaagaaaccttttagagtagagggaaagttttataggaaaaggaaataaaaggtctgaattcaacactcctatttgtatactctgtatataacgcatttgagcaattttcatcttcggtttctctctgtaccatttatattctacttatgaaaataaattgggaatttcttagctaatgaaatctgttttatctaataatttgaaaatatgaatttttgggtaggaagatatctatttttttaaagtttatcattttgacttttttgttttcttaaaatcagacctataatatacatatgttcttaatatataattggatggttaaatttatgaaggtgagccattgtattgtttccccagcctttttttttcctgaaaatgtggtgtaattttttttttttttttaaatccagggaatcagcagtctcttcagttctttaaaagtggtgcgtctcttacgactgggccgtgtggctaggaaactggaccattacctagaatatggagcagcagtcctcgtgctcctggtgtgtgtgtttggactggtggcccactggctggcctgcatatggtatagcatcggagactacgaggtcattgatgaagtcactaacaccatccaaatagacagttggctctaccagctggctttgagcattgggactccatatcgctacaataccagtgctgggatatgggaaggaggacccagcaaggattcattgtacgtgtcctctctctactttaccatgacaagccttacaaccataggatttggaaacatagctcctaccacagatgtggagaagatgttttcggtggctatgatgatggttggctgtaagtattttaattttttcattgaaaattattgttattggcaattttcctggctacaatctcagataggatgaaaacgaactactttgtttacagaaaggtatttaatccatcttatttgcaattgttttttttaatctaccttagaaaatagaaatgcaaaataatatattttactcttcaggacataataatgtgtgaaaaacatattaatgtgtgtacccagcagtgctctcttgaaggaaccaggaccagcatccagagaggtggcgtttcgcacattccatagattttgttggtaatgtgttaaattccaaaaaaaaaaaaaaaaagagataggatctgatgtgaaatatattgtttataaatattctagttaatactgaattcctaaattaaagttgaccttaggatacacttttgtataggtttttacaattaagactaggagaaagggtttataaagctagtcttcattatagccactctaggttgaatatatgcctgtttgagagaatgaaaggattactgaatataagcccattcagcaatgagaagtgtctaggatttaacaggtatacctgggtaccaagttcttggaagtagaataccccctaaaggaacaaagaccatgtgctctgcactcagactgtgactggatggcatcagaagaccagaacataaaggaaatacatacaaagaagctgcttttgaagatcttgagggagacttcaccatcattcacgccttcaagttgacttagatgacttatccacacctaaactaaccttaagattgtactttgattttgtatcctgagactttgctgaagttgcttatcagcttaaggagattttgggctgagacaatggggttttctagatatacaatcatgtcatctgcaaacagagacaatttgacttcctcttttcctaattgaatatcctttatttccttctcctgcctaattgccctggccagaacttccaacactatgttgaataggagtggtgagagagggcatccttgtcttgtgccagttttcaaagggaatgcttccagtttttgcccattcagtatgatattggctgtgggtttgtcatagatagctcttattattttgaaatatgtcccatcaatacctaatttattgagagtttttagcatgaaaggttgttgaattttgtcaaaggccttttctgcatctattgagataatcatgtggtttttgtctttggctctgtttatatgctggattacatttattgatttgcgtatattgaaccagccttgcatcccagggatgaagcccacttgatcatggtggataagctttttgatgtgctgctggattcggtttgccagtattttattgaggatttttgcatcaatgttcatcaaggatattggtctaaaattctctttttttgttatgtctctgcccggctttggtatcagaatgatgctggcctcataaaattagttagggaggattccctctttttctattgattggaatagtttcagaaggaatggtaccagttcctccttatacctctggtagaattcggctgtgaatccatctggtcctggactctttttggttggtaagctattgattattgccaaaatttcagctcctgttattggtctattcagagattcaacttcttcctggtttagtcttgggagagtgtatgtgtcaaggaatttatccatttcttctagattttctagtttatttgcgtagaggtgtttgtagtattctctgatggtagtttgtatttctgtgggatcggtggtgatatcccctttatatgctgctataaagacacatgcacacatatgtttattgcagcattattcaaaatagcaaagacttggaaccaacccaaatgtccaacaatgatagactggattaagaaaatgtggcacatatacaccatggaatactatgcagccataaaaaatgatgcgttcatgtcctttgtagggacatggatgaaattggaaaccatcattctcagtaaactatcgcaagaacaaaaaaccaaacaccgcatattctcactcataggtgggaattgaacaatgagattacatggacacaggaaggggaacatcacactctggggactgttgtggggtggggggagaggggagggatagcattgggagatatacctaatgctagatgacgagttagtgggtgcaacacaccagcatggcacatgtatacgtatgtaactaacctgcacaatgtgcatatgtaccctaaaacttaaagtataataataataaaaataaataaataaataaataaaaaagattgtactgaaggtgtgattagcattattagcgcctcttgagcctttggatcatggtcatcggtttttgtgtgtgtgtgtgtgtgtgtgtctaagctgtcctttctgagattccatgttgcagaggcttagattttgacattgatggcaaaagttctgggactccaagggcgtttgctggaacatgaaaggttaatatcttgagtctaagcaggtagttttcatcatttagaatgtctgaaagctattgaagcatcagtgttggcagttgttcagcttctgtttgtctaatgaacccttgtacaggtataggaacaagaacaggcaggctctatttgctggttagagcttgcagttagagggagagtgagaattccaagtgctgtttgctccagaggctttcagcaggaaaatgtccttatacacagagagagatgctgatgattaattaaatggatacctacgtatacaaagtggtaagatgtatgggcaaaaatgtactttataaattcagaagacaacattttgtcagaggctgtatttagcaccatactacttttaatatttatacattttgccttatacttgagcatagttagattaaaaaagaaaacctttttgttttgaagtaattatagattcattggaagttgcaaaaatagtgtggagagggcctttgttaccttcacctagtttcctccaataattacatcttatataactatagctcagtatcaaaattgacaatgatataatgtgtgtgtatagctctgtattgttttatcacatgtgcaggtttctttaattacaactgcaatcaagatacagaactgttcctttaccacaaagctgtcttttatatgtaacctacccatttcccccaactatccctattccctgaaaactactcatctgctctccatctttataattttgtgattttgagtatgttatataaattaaattatgtaaaatgtaaccttttgaaatggactttctccgctcagcataatgcccctgagatccatctaagttgaatgtatcagtaattaatttgttcttttttattgctgagtagtagttcatggttaggatgtactactgtttaactcaccatctattgaaggacattgtatttgtttccagattttggctattacaaataaagctgctatgttaatacctaggtgatgggttgatattgcagcaaaccaccatggcacacatttacccatgtaacaaacctgcacatcctgcacatgtaccctggaactgaaaataaaaaaaaaaaccacacaaaaaacacaaagctgctgtgaacatttgtgtataggtttttaatatggacattagttcttagttctctgggataagtgcccaggaatgtgattactgggacatgtgataagtgtatgttcaatttttaaagaaattgccaaactattttacagagtggatgtactagcacagttatatttttcataagagaattgtaggaaaataaaatctatgtagagtcaaaggacacaattatttactttgtttctgaggccccgaagttgggaatcatcctagatttctgtttttctatgttacatctattaataacatggcctgtagggtttaccttcaaaatacatttgattatttctctctccttccatagattaccacccaagaccaagtcaccatcatctctggcctgaacttttgaagtaacctcctatatcttcctaattttcttatgcttgccctacaatctctatcccaaagcttaagcagcccctttaaaagcaaatcagatcacaccattcctctgctcaaatccctccaatgtgtgtgaaataaagtccagattccctagctcatctttcaaggccttcctgatatggccctgcctacctcactcacttcactttcaaccattcttccttggcttatcctcctaagtccatgctcaccatctcattttccctgaaaacatcagtcttaggcctgtctcagagtctttgtacttgctttcccattgcttataacactcctctcctgacctatgacccgaattcatgtggctctccacggtatcgcctctacagaaattccttccagtgctaccctactataaaaaaacacctcaatgccaacctgtagtctctactctttaacctttcccttcattgtccctaccacgatccgaacccacgtgtacttggtttttcttttccttcagaatgtaagctccatgagaggtaggcctctgtccgtttcttgtatccccagtatctaaacaattcttaagagttttgtgctcaatcttaatttttcatatgaatgaatgaaattgaagatgtccctgatggtcgtgatgaagatcttctgtccttgaatccatcccagttagatctacgatcaagtacgtgccagcaaaatgcagggtgttagagctttgaccccgattcctttgtgaaaggcctggtaagctcacctgcattgtcttcctttgggggtgtagtcattcctttagctgagttggtaaccccgtgtcttatcggcctatcgatataagttctaagaagcaagtcactggaagctccaacaaaatgttctctcactgcttcttaccatctaccttctgaatctacctacagtggaaattttcacgtatattcagttgggtttccgaaactgtatttggttcagagttggttctattccttctctccttcatgaatagccaattatacttgctagatctaaatttccatttctcctcatctcttccattttctgaagttcctgttttgatttagagataaaaacctagttttaaagttggttgttttcttctctgagtttctattatattctttgaatacctgagtagcagttttctgtttgtataccaatttttgacatcttcttgccttttgacttaggttttccttttatgcttctgattaagtccagtttctatagccagagtattccagggagatacctttaaatttcccttttagtccttgggtccttggtaatttcatgggatatttcctttgaaaaacctgagaatattataaaaagctgtctagattcatgaagtgttatagtacctttgcacagttccaaaatttgttagacccgaaatgtcaaccaaatttggatattgtagctctttgtaaatatagtatcatttttttcctacaagaacaccaaggaaaacaaacaaatgaaaacaaaccacctgcattcttagaaaccaatatgtgctagcagccatagccagggatttagcggtgtgtgtgtgtgtatgtgtggtggggaagataggatagggaagaggcaggtagaaaacagaaaggttcattttttcacttgtgccagggttctagtcaatctgtgtggctgtctaagaagcaccacttgtaaccttataactcaaaaacagaaaaatgttttatcaaaaggttgatggagacaccaactgcctatattctgttgagaaaaataatcactacttgcaaatgatagactctttttctcgagaaagtcatccaaaatttatatgtctttcagaaaaatttagaagtatgaatgtggcaacaatcccgattcctaggtccttatgagccctcttttcaatggcctttcctttcctaggctcttgctaccataatgctaagttggatgtgggctctgtctaagactacagtctcaaaagttttccttgttcatatatcagacagatcttcaaaaaatagtataggccttcccctaattccactcaactgagattccttccagatccctcctatgtcagcagggtcccaggatacttttcttacctgctacctgggaatttcttagacttaaatcctttgttcctatatttgcccaacatgggaaatcttcctgttcagatttctgaattggaagggttgcctgatgcttctctatatacatctaccgtcatgcattctttaccttaaatttgtcttctcttggttttttcatactctgtctgccttgagtgacctccactgctctggtggcagccattactccccagggtagccacatcctccccattcctctgtatctgtccattcatgaatgaatccagctactctgctgacattcacaaaattcactaccaaagggcttttgtgagagaatatttttgcagcacttgtagaaaatagtatgtatgtacatacgtatgtgtgtgtgtatgtgtatttagatcaagatgtaagtaatctccttgctaatttgcttggtaaatacttaatgatgccttcatgaagtgttttctaatccattttatttacataatcttattattgagcccctaataatattagattttctaaggattaggcacactgactaattttgctgctattcagaaggcaccatagtacgtggatgatttattttgatgactataaaacaaaggaatgcaatgatggaatttttctaataggattatactcttgtcttcatatgtttttaaaaatcctcttccaaagatttatcaagaaagcagttacttagtcccttctttattgctaaattatcatataaactgtattttagtttaatccagccgttataagggactctacatctgcatatttcattataattttctaaaagaaagaaacatataaaataaaaatatgttttgaataactctttgccataagttcaaccataatttttttctctctccatatatatgttttagtacactgttaagtacattattaaatatgtattcagcatatgtcaaagggctatgagattggaatttgggtattcattttctctaaaagcatttttctactttttctattgtctgctttggtaaattgagacaggctgacccatgcagtatatgtcaatgagaatttgtcctgctgtgatgcaatgcaaactgagtcttataaagcaaaacaaaccaaactaaaaattataaatataaaaattgctggggtttaattggtagacaggaagccctgtcataatgatgctaatctgcaattttcaaataggatgtaattggtaatcacgtaaacatctaaaaactttctgtaattgactagtatgatctgtaatgcagtagacaaatggtttagcacatctaaaagtatagcaagaccatctgccagtgggatgtgtatgacaagaaatctgaatcttcatgtaggcggttaagtgcaactgggaagcatttagttgcacactggtcaatcagcaccatacagaggagaccaatgccacacactgtattctcatgttgatgagtttattcagcatcctctgtggaattcagataaaagtcaagctgaggttatgggcattgccctgacttctccccaccggaaaaggaaataaatagaagatggtaagatccagaaattgggagaatatagagtaagttgggagcaaaggcccgtgtgaccctggagagtctttacatctctctgagctttatttatttttttcaattgtgaaatgccaaagttgaaatcagtgacttttaaggtccctttcaggactaacattctatacttctaaggttctattggtgcatttatgcccctgtccatggcatggagctggttattggagatgaggttaagatggaaagaaagtggtgtcacaaagatgttagggctttttacatatagtgcatacattgctttatggagaataagatgtgttttctatagaaaatgttctgtaaaggttaagaggaaaagttgtcagagaataaatattatggagaaaagaaaatatgcttttggaaagagaagtgtttttccatatagaaattaggcagctaggaagactgaaaggcatgtgtctcagggtaaaggatcagggcccaggaagagactgcacaccatgcccagtgggacttggacttggagaggtactcgacctaggtggatatccagacaggcttaaaagtgggttgttgccctttcctaatattagaaaaaaattattctacaaatcttaatatgcgacttcaggtatttcaggtataatattaagttacatgttaaaatttgtcttggccttgttattgcggtgtaggtagaaaatgcagtgtgtacatgctgattttcatttctggctttagttttagccagatggggagagctttaagcctaatgtttattttggaaactgggtcaattctttgtgtctgctttaccatagcttgtaaagaaaactttgtcttttttcttttctttaatgagctgagtttcgcatgagaaaaaacattttatggagccccaagttcagggttataggcaccttttttcatggtttagcagtctcagatgtgtagtccagggcagtctcagatgtgtagtccagtagttagaaaaagactgtgtgatgtacactttactccctgattcttattccaactagggcttgtgtcttttgcaggaatgttcttttatacccatctttcttttcattcctagtcacattttcacaaagcctctcaaattctgtaaaggttgactttccccagaaaacagcatgacattttcttgatagcctattaactagcctgaacgttttacaaggatcttcatctcttgtgtccttgtatcactcaaaattatttaattcattcagccttgtgccaggtgttctggtatacattggtatttaagaaacactagatacttttgagccctcaataaccttttaatgtggtaagagggtcaaacaagaaaatcactgatccatctgtctctcccttactctctccatccccatctcaatgtccacctctgccttcatcctcgtctcatctgttcttatactatgaattaagagggaataaagaagctggacttgtgagaagaggatctgtctttgtcctgttcatcattgtgtatttagcacaaagcattatctcctacttgatggttgtgcccattgaacacatgttgaatgaattaatgaatgaataaaaatgtttgcctagttcagcctgagggagcccaggaggatttctaggagaaagtgactcttgagctcagaatacaaaataagtaggtaaatgaggcaggacttagctattttccaggtatagagaacatagtatatgcaaaaatgtaggcatcaaatagcttggccctttcggggaactccatgcatttcactttggcttgagtggaaagtagatgtgaatggaaagaaatgaaagaaccaagatgtcaaaaagctttccatagcttcacaaggagtttgccttttatcctaaaggttgtgggataaataagaaaaatttgattctttattgtggacaatgaattggaggagataaaggctactggcagagaaaccagttaggagactgttgcagcaatccaggaagacataaattgaggtggtaaatatatggaggacagtatagatttagagttggcaaactttttttttttctgtaaatgggcagatagtgactatcttaggctttgtgagccatatggtctctgttgcaaactactcacctctgcttttgtagtgctaaaacagccataaacaatacgtaaacagatgagtgtggctatgttccaatacaactttaagcaggtggcagatcagatttggcacgtggtctgtggtttcatggtttgtgaaaagactgtggactttggagtcagacaaatgaatctaggttcaattttttgcatcataatttataagaatttatatcagttatgtaaaccatcatttgtaaaatggagataatagtctctactttgcagagttatttttgatactccagaatagattgtacgtaagcttcctgaaaaaattttttttttgaggcagatttttgctcttgccacccagactgtagtgcaatggtgtgatctcagctcactgcagcctccgcctcctgggttcaaatgattgtcctgcctcagcctcccaagtaactggggttacgggcatgcaccaccacgtctggctaattttgtaattttagtagagttgggggtttcaccacgttggtcaggctggtctcgaactcctggcctcaggtgatccacccgccttggcctcccaaagtgctgagattacaggcatgagccaccatgcccagccaagcttcctgaaactttaaaaaatgtttttatgggtgaattaatgaatatgtggggtattttagaaggacgagttcaaaagcacttgtagatttctagcaaattcagctgaatgtatgatgaagcttttttctaaaataggaaaaaggtgcagttattactggaggaaagtggttctttttcctgcaggttattctgatggaaatgttcattaggtggttagaaatgtggttctggtttccagagctatgaggcacagagagatctctttgggaataacaatgtatagaaagtaatcatgtcaaggaagtgtacggtgcagtcagcataaagctggccaagagtagactctgaagaaggagagccacagaggggctgagaagagaacccagtgaggtagaatggaagcatgactctggaaggagagtctgttgctaacaaaggatgagagagctttaagaaggaagggagaacaacaggaccactgagagaggaagtcagaagagatctgggaggccttaggaggtcatcagtgactttatctgacttgtttgattggctagttgaggggagagagccacatggggaactcatggggtccaaaccgttttttctcctatatgaaggaaaataatgtattattagccattaacttcatggaggtagattatgctgatgcagtaattttcacagccaatatgtttttctaaatcaaatttcaaattcaacaaaatatacttgttcgattattagatgcataacatagacatagaatttctcttttgtgttataaaacgaaaggtagcattggcttagaagtttgtatgaaattgaactttcttagaacagacgttttagtcagaggagaattttatttacttatttggtgactttccaatgaatttaatattaattcctatgagaaaatatttttcaggacacactgtcacctggtaggtgaagtgatactctggtgtagaacagacagtggggatgtagatgattctcacatatgtgatatccatcaattgacatctgattttaattttgcttaatatgtaatacttaaatgttttttcacaggccgaaagactcacaaattcatagatgaatatatttagaacttattaaaataaatgtcataccaaaggcctttaggcatggatttaaggatttctttgatatggccagagaggggattttatttggagtaatttctaagccagctcctaagtgacttcttcttacctacttgtttaatattttcatatgttgtgacaactgagttagccctccctggaaggttaggtaccaggcacatggtggtagctttaggctgagtgtgtaggtaaggagatctttatggggtgagaactatatttaagtggactctcaggaaatactggaggctttaaaaattccctttgaagctggctctgtagctaccctttttagactctatctcctttaaagttgagcttatttttaacaacacccccccaccagatcttaagctgtgaaggtctaatttgggaccattactcatttaaagtgtcctgtaagggaaagacatttaaattcatgcccctatttaggcatcagcaaaggaggcaggtctggtattgactcttctgatgagacttcggtatgggaatagtagacctcgggaacttttcttagactgggctgttgagttttcctgttggtttccttagaaagggtccaaacggtcccttcataggtctgtttccccaacttctttcccttatgaggacccagctagagaatagcagaccctcctccccaggcacacactgacactccaaattccttcatcctgtgcccttttgctgccttaacaactccatctggatctatttgtctctttttctgttccagggttgctgagcactggctggagtcaactagacagccttgtgaacagctgcccctaaaatgaatgtttagcaatcttacgaatcttcttcctgtaacattttgctgagcaacaattcctgtacaatttgcacacgttctcctcctttccgaaacctatgaccactcatcttcattgcagcagatggccttccttttacttctgtgaaaaagaaatgtgttgcagatgtgcattcctttacactcctgactctccccttaggaaggtgggctaggggtggccaagggtgcaaaccattcagggccttataggacaggatagtagcccttactttgagccagatgggaagacttttgagggtttcagaccagattgacttgatttgtcttatgtcttacaaataccaatccagctgctgtgtggaaaatagactgtacagggtcaaaaatgaaagaagacagacaggtcaaggagagagatgatgatggtggtggttaggattggttagattccagacatacggtaagaccagcaaaacatgagggtttgagagaaagagagtcaggatttaaggctttcagggcaagcaactgctcttaagttagcgatggatggtcatttgttgtgtccagtgggcagtcacatatacgattctagcattctgtgaagtggccccggatttgtacatagatttgtgctgtagcttgattatttttcccttctaattgtttgtccttccttctcctcctctttcttcatctttttttttttttttttttttgagatggagtctcactctgttgcccaggctggagtgcaatggtgtgatctccactcaccccaacctctgcctcctgggttcaagtgattgtcctgcctcagcctcctgagtagctgggattacaggcatgtgccaccacgcctggctaatgttgtttttggatttttagtaaagacggggtttcaccctgttggtcaggcaggtcttgaactcctgacctcgtgatctgcctgccttggccgcccaaagtgctaggattacaggtgtgagccaccgtgcctggcctttttttttttttttgaggcagggtctcgctctatcaccaaggctgaagtgcagtggcgtgagctcagctcactgcaacctcctcctcccaggttgaagcaattctcatgtctcagcctcccaagtagctgggactacaggcatgcaccaccatgcccggctgatttttgtattttttggtaaagacagggttcaccatgttgcctaggctggtcttgaaatcctgacctcaagtgatccgcctgccttggccttccaaagtgctgggattacaggtgtgagccactgcacctgagcttgtttttctttcttctgcattgtccatctctctctctctctactggctctttctcttcagctgataaacatgctcatgtctttttaatcctaagctaatatacatatgtgaataaaacacttgacctggaccttgcattctctttgccttattacccagcaattcttcccttttaaagctttctaaagcatgtgtcttcacttccttttcttcatttactccctattgaaaatgggcctcttctcctatactgcctctcagagtacatttgctagatttcatagacactttttcatgcatacggaagtacttcttctttggcttctttaatatttctctctttctggctctcccctgacctctcttgctatttcttctctgtttgttttgctggatcatgttactgcattgctgtcgtaaatattgaaaactgtgatattgggaacaaattattgaaagatcaagggcagctctcctgataggctgagcagtttctcccacaaaaagtgacttcatgggagccagccgactctcagatattttgctcaatggtccaccattagaaatcctgctgcatgtgttcttgactccagaaggccccttgaagctgccattttgtcctctaaaggatgtaagttcctcatctctgtaccagattggactgagttttaaactggcacagtgtctcaatgaagagaaaataattgttgagatttcagaggagggtggagaagacgtctggagcatgggctgccgcttggcaggcaggggtgggaaggagctaaggtaatgatgccaagaggaagaagagaagccttttattttttcctagctctgtgggaaaaataaccagggattattaattcacaccaccttttccctcgtttactgccatgagacctttttcctccagtctgtctgaagtgtccctattactttatacttcattatttcttcatcatggtctctaattatattctttaattctttctttatgtaattattgcttgtctttctaactaaaatggagccacaaaggcagggaacttgtctttctagttccactctgtatccctagcataacaggagtgtagcaggtgctcagtaaatcctccttgaagagataaatgtattttgatctccatatttgtaaagttgtaaattcaaaaccatactagttctccagacctaaattcttcagtcttgggtttaaattttcatacagtgaaacataggtgaatgaacatgtgactgatttcatttttctgtacagagctaataacttagtttaggacctcttccctcatccccccacttttccacctttcatagtacgcttgactgccacatctgtgctatggctgtactggccactctgtgtctatcatgttgtagagttctggatgggaagctggatatacttctttgctgcctttgattttcccttcaacctattttgggtttctcttgttacctcctatagttccttttattctgccctcttatgtttcactgccacccaccaccatgttttctgggaaaagaactaagattttaaagtgaaaacaaaacacaacaagaaagacgacaaaaaaaccatttgctatctcgagggcctggcacttgcaaaggaaatctatgcttttaagattattgttttggctatgggctttaaaaaagtctaatttgaaactcaaagctaagctgctttctttgttctcagctgttaccacactcctcttgaaaagtgactgccactgtttcagtgagaggatagcaaaagggtcattaggaagagctaggaattagagggactgaaaacactctgcacctgtgtgtccctcatcctcgatcatgctgaggcctggcataaatgcacttgccatacttccaatctttctttgttcattggatacagaagagaacaacctgggaattttaatggtttggaaacaactgtctgtactatgggcagcatttgattatgaaatttggatagtctcttctatagagggcaacacaaggtcaggactgcttcaagttagatgagaagcacaaatatcatttttggtgtttgctaaagaaacaaaactatataagtgtgttttaaagaaatttgcgcctgtagtctcagctactagggaggctgacgcagaagaattgcttgaacccgggaggcggaggttgcagtgagatcatgccactgcactccagcctgggtgacagagtgagactctatctcaaaaaaaaaaaaaagaaagaaagaaagaaagaaatctgcatttgaaaaaagtgtgtccatttactcacagggagatttcagtggcttctgatgtttgatcagagcctttctgtgctgcgtaatttgaactgctaatttattcagtcattagagagaagtttccagagaaaaagtggtgattctactgggatttgggtaatggctaataccagggaagacagagctgagataaaccggaaggaacacagggcccacagatgaagggaaggaaatctcaaatattttccacgtctctggttctcctgccttctttttcatttaatctgtgtgctaattcagattatctgactgtagttttttaaatttaatttttagatcgaggtaatacatacatgtagtttaaagaaccaaatagcgctataaggtttattttgaaaaatggaaattccttgatcttcatgcctttagacatttcccagagatgactttcaaatcattttcatttttttggtggcatttatctttttgtttttacatgattattggagagaattttcagttttagtcattgtctgttgacttccatctttggaagatgaaaataaaattatataattctctttcctgtcctatgtctcttaactaccactacacacacacacataaacacacacacatacacacacacacacacataatatatatgtgcatatatatgcattttccaattttctaaatcttctctatatttagatcataattttgatataatcaatagctgttttcattattatgactaggtatatgctatttacaactgagtcatatgttatactgtgattattttcctgtacaacatttgatttcccctagtgtagtcattatcacaattttttttcttagtttcttatgttgcttcttttaaatttattaccaaattctcttccattctgtaactctaacctcatcatgctcacattaggcggttataactttttatctctggagggctctttctttgagccttctgactttctctagttgcactatcccaggcttgacttaaagccctcagcctgttgtctcccattagccctgatctccaggagtccctttgcctttctcttttgtggacccattgtttcctatatctgttttgaatgaacacctcttatagtagcctctagagaaagtatagataaaagaattttttgagattatgcgtgttttaaaatgtctttcatttatccttacacttaactgatagcttgtctgggtagagatttaaaggttagaaataattttatgaaaattttggtgcactgttcttttgtctttgaacttctaatggaactgttcagaggactccatttgagccttgattcttataaatgttatgtttttctttctgtttccactctggaaacatttagaatctttttttagttcccagtattgtgaggttactatgacaaggtatctttctatggattcgttttcatcccaatgggtatgtgtaatcatttggaaatgcctatttttcactactgggatattttcttgagttatttcattcacaagttactcctggttttatctttttccctttcttgaaattcttattatttggctattggatctcctggattggttttttagttttttttttttttttaatctcatttctacagttttctatgattttatcttttttactctatggtctagaagttttcgtgtattccaatttctaatccttcttttgagtttttgtttctgcttgcctacgttaatttccaagagctcttgccttttctctgtgttccttctcatagcattgtgttttcacttcatgagtgcaaaatctcctcttctctttctgagggtataagaaagtttatgtgtagttttcttatccccacatagtctgtttctatcaagatgatgttttgtttgttggttttggtctctgcttctcatggtggaggctttatgcagatgcctcggaatcctggctgtctgtttttggctgatttgtggctgtggactttatgtagggagatctaattgggttattttgtggaaaatcctcaacaccagtattttggggtcatttctattaggctgccaattccctcagggaggaattttctagtttccagcctggagaacatagcccttgcactgatctctctggaagctgaatggagaatagagctgagggtttgacactcagtgtgtaagctttcacataacccctgatttcagtgtgaaacccctactttctgctcttccttcattgcagggatcctctctagtctgctgaagtgtgaaaagggaaattgactggctctgtggaattagggaaggcatctggaggggtaggtgtccatctgtttcttaaacagactttcaataaatcctctagttttagccccacctttgctccttcacttcccaaagtacttggtggtgacaattcctgggatatttagtggctctgtactgcatatcagattgttaattatcattcctttctgctggtttaagatccagctttcttggatctgatgagttagttactacttgtcctatgctttccagcttccaaacttttgttgcttttgtctgttctactgttctgtttgttcttgtggctttatggctttacgcaatccatttactgttattttgtggagttttgagaggaaacagaggtatatacatgtcgtcaaccctctatctctggctgagtctctctgcttctttgcataggtctgttagttctgctggttcatgctcctctgtcatgtgtttatcatccggatttatgtagctcttgatcaaaacgttcccattgctatttaccatttgtctcaagctacttgtcactagagaatatcccaaccttgctaaatccatcagaggttcattgctataatatctgtctatttaacctgtaggtctacttactgtctgcttggcttcccagctgttctgcatggtctctgttttttggaagtcctctgctgttatatacaacctctgctcgatcattttctctgtactcattagatccaggccatccctgatactacatcattcctgaagcccatctccggcaggtatctctctccaatcccttaaatatatggattagcactgtaaaaatgatcaagcactgtgtcattatgtaggttgagtcaagggtctaaacttttcacatagggttaatactttagagttaaaggaaggcatgaaatgtaccagcatcatggataaagttggacctaaatatcttgcatttcttaaagtcaggtttctattatactcattggactagaagtggacagcaatagagaagtgagatgaaaaatcactctcattcagtactgtgaactaaatttaaaaaaatgagggctgaattcctgttctattagattttagtaaacagcattctgtagtgcacagggaattcttcacaatgctgtgtgaattttgttggtaaacctgttacaggtgtttttcagtttgtgtttgggctaaaatattgtcaagtggcatacttgcctgaggcagtcagtgtaggatcagaacatatgtgcctttgatgaaagctgcttttcagtttaaatcactgggatgcttgtgaagctgtatcttatgaacattgttatataaacattgcctttaaaatctttggcttgagtctcaagtaaataggtttatacagtatgatctgctggctgagcagcaatgaaaataaaatgtctccctgttgtggtacatggaatttttctgttgtcaggtagaactttgcctacagaaatttaaagtgaggcaaagctgactaatgaaaatcatcatggttagtggtgttaaaaacaaagcttctacactgtggtgggaatgtaaattagttcagcaactgtggagagcattttggggatttctgaaagaacttaaaacagagttaatattcaacccagaaatcccattatttggtatatagccaaaggaaaagagatcattataacaaaaagacacatgtgcctgtatgttcatagctgtgctatttacaataacgaagacatggaatcaacctaggtgtccatcgatggtggactggattaaaaaatgtgctacatatacaccacggaatactatgcagccacaaaaaagaatgaaatcatgtcttttgcagcaacttggatggagctggaggctgtgatcctaagtgaattactgcagaaacagaaaactaaattctgcatgggagctaaacattgagcacccatggacataaacatgggaataatagacactgtggattactagagggggagggagtggggcatgggttgtaaaactagatattggatactatgctcactacctgggtacaatatacccatgtaacaaatctacacgtatcttccctgtatgtaagataaaagttgaaaaagaaagaataagaaaaataagagtttttattttaccttcagaaaaaaagagaggttcaaaaatatcataattaaagtctatgtcctcattataaattgaacaaccagagtgtctgagataagagtgaggaagggagaaaatagtgcaggacgaagtcagaaaggtaatgagaccagaccatgaagggccctggtgaccattgttctgtggatggagacttctagagcattctgagtagaaaaatgacatgatatgacatattttaacagtatcactctgactgttgtgttgaacataaaccctagggttacaaggtgggatggagaaagataattcagggaggctattgcaatcattttagtgaaagacgatgttggtttgggccaagatagtaacaatggaggtggcaggaagtggcgagactctggttatgttttgaaaatagagccaacaagatttgctgacagactagatgcgggggggtggttgttaaaatcagagagaaatcagagatgactccaagagtttttttggtttatatatctcttaaggatgggaaataatttggggaaaacagaggagagagatgtgctagaattaagagctaagttttgataagtcatgttaagtttgagacgctgcatagacacgtaagtacatatgtctcgtaggcagtcccatagacaaatctggagttcaggggagaggtcctggctggacacatacattctggaattgttgatacagagctgatatttaaagtcatgagactggttgaaccctccttgatattgaatgtgaatagagaagaggtctaagcactaaactctggcgcattgcaatatgtagtggtcagtgagatgaggtgaaaccagcaaaaagactgagaatgaagtgagttaggaagaaatctaggagtgaggtatgctgtaggtcagctgaggaaagtgtttcaaggagggatgagtgagcagccatgggaagttcctcttacaggtcaatcaagacaaaatctgggaattgatcattggattttgcaatcttagggtcactggtgacctttagcagatttgatgtaatcttgggggcaaacgctcttacaaacccctaaacctcagttaccgcatcggtaaaatggggtagtaatattattacgtatcttataggattgttgtgaaaacccgataaattaattcatataaaatgctccaaataatgcctggctcattgtaaatgctaaataaatatttgctgttgtttctagaaacctctattcaggtgctcattaattgtcagtcataatcttttggtaaggtcctgcaactaattaagaatctacctaactgaatgagcatccagtcttccctgctaggctattattgaagatctttttcagcgcctcaccaaagtatagataaatctgaaaaacatgttaactctattaagcaagaaatgaggttatcaccgcatgacttctgcaggatcatgtgctgactcctcttatttctggatgcttatccattctaaatcttgtccaggaatgcttagttcactggtctcctattggaattcaccatattttcatattcttatttgaaaactacagttgggtttgccttatttctagtcttttaccaactctttttcaaacatagctggcagtggcatagttatctctctggcacgttcttcacagtgtcgggatgaaatctgatggggctagaacacatgaactcatttagagctattaatgttttgttttcttcacaacccatcatttttaaattgcagtaaaatatatgtaacataaattttactatcttaacaatttttaaggatacagttcagtggcattaaatacattcataatgttgtacatccttaacccctatatagcctcataactcttgcaaaacaaaaactctttacccatgaaacaatagcttccattccccttttcttcagcccctggagaccaccatccgactttctgtctctatgaatttgagtattttaggtgcttcatagaagtagaataaaagtatttgtatttttgtgactgaattatttcacttagcatagtgtcctcaagatttctccattttgtagcatatgtcaaatttttccttttgtaagggtgaacaatattcctttgtatgtatataccacattttgttcatgcatgcatctgttgatggacacttggttgcttccacattagctactgtaaataatgctcctatagacatgggtgtataaatatctccttgagaccttgctttcaattcttttggatatctatccagaagtgaaattgctggatcatatggtagttttatttgtaatattttgaggaaccaccacagtgtgttccacagtgcttgtaccatttcacattcccaccaacagtgcacaagggtttcagtttctccacatccctgtcaacacttgttattttctgcaagtagccatcttaatggtgtgaggtagtatctcattgtagttttgatttgcatttccctaatgattattgatgttggacatctgttcatgtgactattggctttttgtatatgttctttgaagaagggtctattcaagttctttgccctttattgaatctgattgttttcttcttgttgagcttttgttttctttttaaatgtttgccttttattgggtttatatcgtctctcagcagtgcttataatccacattctgctcgttataatctgtcattctgtgtgaaatggggacaggcagagcaggagtcaaggacttgtgagtcctctgcatcattcatcaacactgacccataaccaaagaagcagatgcagtggactgaattgtgtctccctcaatttcatgtgttaaatcccaacccttcatgtgactgtatgagatacagggcctttaagaaggtaattaagattaaatgggttaaatgagagtggagccctgatccagtggagctggtctcctcataagaagagggagagacaacaggactctcttccaccatatgaagacacagtgagaagctggctgtctgcaagctaggaagagggccctcaccagagcctgaccatgctggcaccctgatctcagacttcatgcctccaaaactgtgaaaaataaatttctgttgttcaagccactcagtctttttgttatggtagctcaaatggactaagacaccaaggctcttctttctttctcctttttgttgtccttagcattttatgtatgcgtgtgcatgtgtgtgtgtgcgtgtgtgtgcatgtgcacaagcattacttctttggggactttagatttcctaagttgcatggaaaaaattctcatttatgctttgagataccggcagctttttaaactaaatccaacatagtggtttgagctgatgaccacctaaaagtttcaagaacttatcagagcaactacgaaggtatacttctagcttatcaaatatcttagcactaatttctttaattctctagagctgatgcaagcctatccttcttgtcttccttgcatcatttatttttctgtctccccttattttccttctataccatccacttgcaatattttctgctgaaacattttgaaatgcttattgtatgttactttagcatatatgaagcattcgtacaatatttatcaatatatggcctttgtcattcttaaagcttgtgcaagtctataatggtgagaagaataccttgtctatgcctctaatttatacattgacaaaaaatgccagcactgtaaggacttttatctgatttttccaagtcgtgtttttcttaatgtgggaatttctttcttctttaattttatgtcagagagcactcaaccatttaactattatttatagtctgtggaaatccataattgggaatctaacttcagagtacacaattatgtctacaaggcttgattacaagctttattgtggtcttatgatccagactgtggatcatacacatgtgggcacaaaggacaatggctgcttattgggaatgtaaaaactaaaagaaatcaggtatatgtgccaggggtgctgagatggggttggttaatattttatttttctgtctttacctgtgaaatgcagaacgagtatgtatcaaaatctgtatacctatataacatatgtaagtatattttaggctgacaaaaatttgatgctgaagaatattcattataacactcaaggggaaaggataaatataatagtatactttgggagaattttgaaagaggagaaggaaacatttagatgaagagttaaatatgcaagctacagttacacaaaagaaagaccatatggtttaatgccatacattagtttgttttaaaccttttgtagtttattttcattttaaaatgaatgtgtgctttaattagtgttgaagtgggctagcaaaacatatgtcttttagttaaacagtaatttatattgtattctctcccttagtcttagtgatagatctaaattctggttaaccaacaaaatgtggtctacaggcaccagggcaaacaatcaatttcttgtttgtttatttttatgttttcacagaactatgacaaataaaaattttatatatatataaaatgtgcagattgatgtcttgaaatatgtatattcttaagtgattatcccaatgaagctaattaacatatccaccacctcacagttaccttttatgtttatgtgtgtggtaagaatacttaagatctactttcttagcaaatttcaagtatacactattattgactatagtcgccatgctatacattaggtcttcagaacttattcatcttatcactgaaagttcataccctttgatcaaatctccccatttcccccacttctaagtacctggtaactacctttctactctgattctatgagttcaactttttcagattccacttgtaagtgagatcatgcattgtctttctgtgcctggcttgtttcacttaacataatgtcctccaggttcatccatgttattgcaaatggcagcaggattttctttttttcaaggctttataatacttaaaaatatatagacattttctttattcattcatctgttgatggtcactaggttgattccatatcttggctattgtaaataatgctgcaatgaacaaaggagtgcaactacctcttcaaaatactgatttcatgtcttttcgataagtacccagaagtgggattgctggattatatggtggttctatttttaattttttgaggaacctccatacggttttccataatggctgtactaatttacattcccaccaacagtgtataagtggtcccttttcttcatatcattgtgaacaattgctatcttttgactttttgataatagtcatcctatcatgtgtgaggtgacatctcattgtggttttgacttgcatttcctaatgactaatgatgttgagtaccttctcatatgcttcttggccattcgtatgtcttctttttagaaatgactattcaggtcctttgcccattttaaagtcgggttatttgtttctttgcttttgagttgtatgggttccttatatattttggatattaacctcttatcagattagtggtttgcaaatatttcctcccattctgtaggtcgccttttcattttgataattgtttcttttgctgtgcagaaactattttgtttgatgtggtcccacgtgtttgtttttacttttgttgcttgtacttttggtgtcatatcaaaaaaatcattgccaagaccaattttaaggaaatttccctccatgttttcttctaggacttttatgatttcaattcttatgttcaagtatttaatccattttgagtggatttttggatatgatgtgagatgaagtcccaattttattcttttgtatgcagataactagttttcccaaaacaatttattgaagatactgttctttccccattgtgtactcttggcatctttgctgaagattagttgactttacaggtgtgggtttatttttggattctctgtcctgttccattggtctacatgtttgttttaatgccagtaccatactattctgattattgaagctttgtaatataatttgaaatcagagagaataatgcctctagctttgtattttttgcacaagattgctttagctattcagggtcttttgtgggttacatgaattttataattgtttttctatttttctgaaaaatgtcattggaatcttgataggaattgcattgaatctgatgtgtagattcctttggtgggtattttgacaatattaattctttcaatctgtgaacatgggatgtctttccatttatttgtgtcttcttcaatttctttcaccactgttttatagtttacagtgtacagatttttcacttccatagttaaatttattactaagtattttattctccttgatgctattgtgaatgggattgctttcttaatctctgttttggataattcattgttagtgtatagaaacacaactgatttttgtttgttgataacatatactgcaactgtactgaatttgttttagctttaacagctttgtcatgaagtctttatgattattctatatataagatatatgtttttctgtatataagatttatggttttctatatataaggtctgcaaacagagacacttttactgtttcctttctaaattggatgttatttacttattttgcctaattgctctaagacttcaggtactatattgaatagaagtggtgagaatgggcattcttgtttttctgatcttacggaaaaggctttaagcttttcaccgttgaatataatgttagctgtgggcttgccatatatagcctttattgagttgaggtatattcttcctatacctaatgtgttgagagtttttatcaataaatatgtcaaatgttttttctgcatctactgagatggtcatgaaaattttattcttcattctgttaatgtggtgtaacatattttttggtttgtgcatgttgaaccatcctggcatcctagaaatagattcagcttgatcatggcgtatagtgtatgatccttttaatatgctgttgaattcagtttgctagtattttgttgatggtttttgcatctatgttcatcagggatattagatacaaccaacacttaacatgttgaaaatgtgctttggttttattctattacactttgcttaactgagaacaaagaatttataggtgttaatttaactattaataattaagtcacatgcttatttggaatatttcatatatatgcatgtctactatataatgtaaatttatgtttgcatacatatttgtgtcttcagttccttgacatatctttgtgcatgtagatggatacacatacagataaagatgtagatgtagctatagatagagctatagatatagatataaatgcagttatctacgtctaaggattaaaaaaatcaagtaaaattattttcctttcctcaaaacctcagggattacaaaggaagacccctatatgcaactgaatctaaaaatgcactgtataaggtggaacccagaatgtatatcatttgcattattatatcataggataataagccagaaaaagagctctggttctagacataattatatagtcctacctatgttacacagttgttatgagatctagtcaaataacattgcaagcatgttttaagcttttaagtacaaaattattgttactattctcagaatactcaaaatccagcccctatgtgtctgttcctgtcaaaagaggtcaacttaagatgtattttattcatcaaatcttgctccacaaggctgttagataaaaagatctgtccttctttgtccattctgaaatcaggtcataactaggctggtgaaccccaagagccaggtcagtcgtgactcattcaagtctttcagaacagccagtgaaatggttgggaagttgtttcagggtgttttttgctctgatttctgcaggatggttgtctgttcttcctatgtccagaggtgtagagctttcctgggtcatttatggctatgagaaatcatatggcttagtccagatttcccagaatgctggtgattcataatttgataaaaccaggctgaagtcatctccaaatccttctccatcacactcaatttctaggtgatagtgaaaacattttcttccctttacttggcattttcttcccattacttaatggtctgttagacattacgcattcagttaaggttttgagactgtaccttcaaaatcatgaaaacataaatcatactttcctgtattttaaagaacagattttaatttatcttctttctatttagaaaagttacaggtttttagctcttatttttactttggatcagtgggtaagtttttgatagcaagagagtgaaaaacgaagcctcccattcctgcaactgtgtttaattacggaacatgctgaaccacatttgactttttttttgtttctgaacttatgtcagcttccccagtctgtgatgaaacacgttttgcagctctacaacaaaggataaaaataaaataaatgtttaggaaagtactttgggatagctaaagagagagagccatacaaaaacacataggcattggtaggaatgacaaattaattgtgctgcctttaagtaataacacagagcaattaatgcatttaatagctttattgaaacaaaaagctcttttgcagtttgcataatttctttgtgtaataagaatgtttcataagtttatagatgaatgcatgacctctgacttagggagttttggtaatatgtatatctctgtgtttctattttcattttcagacagtattttttccttattgtgtaaattcagatctttattgcataaagccagatctaatggctttgaataattgattggtctttcagatttcatgatttatgactctcattttcaagattgtaatttttatttcttgatacaaacataccctaaatcagtttgtttcaagcattttttttgaacccagaacaacactgaatctagtgatttttaagttgcacaggcgggtcgaagattcttgagggattatcttggaactcagggaggtgtaaggcaggtgagtaggcagggcatcacactggaggttatgtgagggttttgtaccccattataagcctagcacttagcacagttgacacattggaataaatgaatgaaaaagtttaccccaccctgcatccctgctttaacctgaaaggttcatttttcccatttttttattgttctcagagtaagttttccagagtttagtagagaatttcagaaacgatgtaaactcttctctgggggctgctaatctgttgctgctactgacatacattagtatcctggctattttctctccatgacctgccttcttttccctatccctccacatcattcttcctaagcctctagcttccctgtaccatttgcccccataggagttggtatcctaaagtgctggttgagcacagtctccattcccacattcaactggcagcatgatcagaaagactgccaactcatcatggagatgggcaagttcccccaaaactctcatgcactgtataaatgcaaggtagtagtaatagtttaatatagaagtttattgatttgtcaaagtaattgatatcaccttgccagaattggacaacctcagatatcctggactttggctctctggtacgccttcgctgacctctctctctctccccgcttggtttgatgatgctatatttaaatgtaatcacactcagtagactatttgactgtcaatactctgggacagcaaaaattattagtcctctcacagtgtccttaggtgacacatgataataagagtaatcagtactttcatgatgggccacgtagatattgtgtatgatttcattttacaatgaacggcagacttcttttctaggatgtcagctataaatctaagagctttaaagacattgattcatttcatcctaatagtaatcttactagataagtgttattattacccatattttacagaagagagaaaattgagcgcacagagattaagtaacttgcagaaagccacccagctagtaagatgtggaacttggtaaggcagcctttttcaagtttggaatgtgagatgctctcaatttaatcatctctgcaatgttccaatttcgttttatccctgtgagtcccagaaatgcatttctaactttataaaacatatagaaaaagacctagagcagttatatcattattaaaatattatctctagggaagtagtatatttgttttctaataaaatgaaaatagcttcattttctctgattgtaaaaataatacatactcgtgaagaaaaatgaagcaatacagaaaatacaaatgagaaatcagaataattggaagcttcattacctagtggcatttgagtgaatatactttctgatatttctctaggcacatgtatatatataaatatagcatttttatgtatgaaactatactacactttttgtaatcaatttctatgcctacagtgtgtcatggatatttttctgtggcagcaaatacaagtatataccacgtttttggattggttgtatagtgctactttgtatggctgtaacattctttatttaagcaattctatattgaagaacatttaaattacttccaatattaatattaaaaataatacgataaaaatgattttcataagtattttggtacatggacaattacctatttgggagcaaatttctagaagatttttggcacaaaggttacgcattttttttattggatatatagtgtcaaacctgaaagactgtaatgacttaacagtctactgacatattttgagtgtgtccatttctcttattccttgcaaatggtgattttgcccatttaaaaatacctctgcttgtctgaatttgaatttattgtatggtttttattttggatattcagtgattagtgaggttgaatgtatttattatgtttattgaccatttgtatgttttgcaaattgcctactatgtcctctatccattgtttttattagtatgctgtttcttttaaattaacttttatgatctttttaaaaaacatattagcgatataagcctttcgtttatcttacgtgttgcaaatagtttttccagctaacaattgattcttcggtcctattttagtaactatttatttatttattatttgccacgtagaaattttaaatttttatatggtcaaacagaccttttcttttatggtttcttgcttttggggccttctgtacttgtagagttgtatgttgtacattacattgtagaaatggcttctttttaatgggacccagagccaggatatgtaaccaacacttatatgtcagttactttaaagtttactaagagctcccacaaacactttcttatttaattcaattaatactttaacattattattaacattcttcagatgaggaaaatgaggcaaagagaataccttaaacttcccatggctcatcccaaatcacacatctagtaaggattagaatataggccagtctgatgccaaagccatggttttagtcatgactctataccaggatcctttagacagatggaacagcagagaaagaggaaggttaaatggcccctgcctcatgctgaacagcatttccctcttttgatagaaagattaggaactgaattcttgactgttaatatgatccttcttggagtaatcggattccagttcagtcttttgaaagaaatttcagtggaaaatcaattagatgttaaaagaaaagagccataggaatgttaaggtattaagaataatgtggggtatgctttgggttttaagaattaagaggatgatgtccaagtagttaaatgaatttgtgaacatgggtcagtgaaagagtaccacgtcagagtgcttggtccatttgcagccaggcatattgaatgaactcttctctcatctcatttctaataaatagtcagagcaagtattaatcaggattttacatgtacaattagaaagggttttattcttggtattatgctggattttggtgcagataaatttctcattcacaggacactttcagtcttcaggtcagattttgcttttctaataaagaggtatatggatttcagttgattcacatcattaattatcagcatttgtgtggatgcaggatatcttgggcaaagctctgtatctgagataaagcaaaaaaaaaaaaaaaacctaacaaaccatttctgccttttatgtccctctttaaagataaattgagtagggagcagtaaacacatgatttcaggtcttgcaatgaaataagcagagctcagtctcgtaaaaataaattaggtaattcaacacagaacaaaagaaggaatataacaatgtaaagctatgtattaggtacagcagatcttacactgactatggcaaatcaaagtgtcatcattttctaatatatctcctctcagggcagttaaatatattttaaactatagagtaagttgcagtttttatgttagtttgtattccaatatcattggtgtgaaatcatcaaactctaatttctagcatttctagaaaatgaacctctttagctcccacatgaattctagaattttcaggattcttctcagtcagtgatcaagttgttaaaaaattgccttggtatacaatgtgggctctgctatttttaactttgtctggacctctttccttaacagttgagataaatcaatcatttgttgggactgagagccgtaaacgatgagaagactgttttcagagcctcagcatttatttgcacctgtgccacactgcaggaatattggcatgaccctccgttgagctgtgctctctcctttcaaatcaaacatgcagtctcagagcccctctgtgttctcaaatctcattagtagtgttttctggcttggaggttttcagaatccactgtttgtatggcagtggaaaaagacattttttctcatcagaaatcagagaaggcacgtcaatggcacaacaaacttaattgttttactgttctaataaaaaggcttcattgaaccaggggctttccctcgaagttaattatttctcacatcaggtttgttctgtctaataaaattaagcagtgaccctaagaagatgccaattgtttgacattgttataaagaacacattaaggaatttggatgcctgagaaatttattgtccttctctttaattgtgtcttccttttggtagtgttcctccaattaaccaattatttggggtatggttgtggttaagaacatgaacatcagccacacttggattgaaaccctggctggctgggcgtggtggctcacgcctgtaatcccagcactttgggaggctgaggcaggcagatcacgaggtcaggagatcgagcccatcctggctaacacggtaaaaccccgtctctactaaaaatacaaaaaattagccgggcgtagtggcgggcgcctgtagtcccagctactcgggagcctgaggcaggagaatggtgtgaacccgggaggcagagcttgcagtgagccaagatctccactgcactccagcctgggagacaaagcgagactccatctcaaaaaaaaaaaaagaaaaaaaagaaaaaaaaagaaaaaaagaaaccctggctaagccacttactatgcaggtgactttggcaagtcactcatttctaaaacacagtttttcatttatcacgtgggggttatgacacctatctcatattaaagttgtagttaagattaaatgaagtaatgtacgtgcaatactttgatagtactgcctaatatcaagtagatgttcgataaaaagattttattactgtttttaagcactgattgttaccaaactattggtgctttcataaatagcttttataaatgcttattggaatagcatttttttccatttatgtatactttcacttcaatgtaaattggggtcctgctatgtattcagtatcaggattcaaagaataatagtatgtagcccttgttctaaaggagtgcagaagataaataattctacctttacttttactgcattcacttgtttaaatattatatgtgcatttttaatggcatttgtaacctttaactctactgggaaagaatataagcatgctacccataagaattatatttcttactatagtattctgtagtatgttttcatcacgtttcttccaaaaatgacagtagttttggaaccttatagacctgaaatattctattcaatgtgtcatgccaaaacatatagtccccgctctcaagaaacaggaagggaagaacttagaagaatatgcaaatttaaatagtgagtttatgacatgaattcaacaaacaggaaaaaagcacaattagttctacacaaataattagtaagaatctcacatgagtttggccagttacaaagtggcaaagccagttaggcatatgtgacttttcacatattgcttaactggagcagggagatctctggttcacacctgtggtgcattggtctgattccgtaagacacttattgtctgttctgtgccaggcactggctcagctctggaaatacaaggtgactaaaacaaagcctccattcttcaaggaacgtaaaatcccaaatccattgggaatgtgcctgataatttatgtttgagaaatcgcttccagcctgtcctcactgcccacatggcgaggtatgcacgttcggcatgtgggtatctcatgagtgttgtctagtctatttgggctgctgtaagaaattaccatagtctgaggagcttataaacaacagaaatttatttctcatagttctgggaagtccaagatcatggtaccagtgatgtctggtaagagtctgcttcctcatagatggtgtcttctagttttgtcctcacatggtggaaggggcaaaggacctccaaagaaacacatacatgtaatatgctttgtatacatgtaaaatatatgtaaatgtgagaagagagagatcaataagatttttctctcttccagtggaaaattcctaggaaattaacagtgctgatcatttataaaaaatgattataaaaccacagtatactccaccctcctttttaatgaagttttatataagatcattattttaagtatctgtttccaactgtctctctgagtacagttttatttaatttattctgtgattggagttctatgatgatacagaatctttgttgcattctctatctctattactgtgtctctttcaatttataagggtggcttcggggcttccagaaaatataaacatgagtgagactatctcagactacattaggccaacataaatgatgactcaccacgagtaactcagttgagatggttattaacgatttctatttttgtggaaggcatatggttagcatgcaagagctctttatacatcattagcaaatttaatttttgtaataatctttgatgtatttttcaattttaagaaagcacatgagagtggtgttcatttactcctgaaaattcagcccttttcactctgattacattcattactgggatttttgtgaatgtgtttattgatactttctcaagcttgaggctgaagtgagaattaatttttgatttttatataaatgatgagggattttagctgggatgtttgaggctaacattgttgcttctctgttcaagattatactgtgggatgaaagccaagagtaattttttaaaaaagcttcaggggtgtattagtgccctacagatgctttaaagatgaatacatttttttgataaactctgtgattttagctaatgattattaatcattaagaaacaatgcttcttctagtatagagtaaaagccatctaagcttgggttttatattgttcttattttgtagtttctcccaagtactataattattctaggtggctatactaattgaatttagaaggggtccctactaattaaacaaaccattgctacattacctaaaattctaaatcagttgttcactgacctctaaatataaaaagttttggccgggcgcagtggctcatgcctgtaatcccaacactttgggaggccaaggcaggtggatcatgaagtcaggagtttgagaccagcctggacaatatggtaaaaccccgtctctactaaaaatacaaaaattagccgggcatgctggcacgtgcctgtagtcccagctactcagaaggctaaggcaggagaattgcttgaacctgggaggcggacgttgcagtgagccgagatcgcaccactgcactccagcctgggagacaagagcaaaactccgtctcaaaaaaaaaaagtttcacatttaacacatgatctgttcttgatttatatcagtattgattattcctggctaattttatattcgaggccaacaagatgcatcagatttattctgcagcttcattaatcttgacaaatcactaccttaccccatacattttgactccttagacaaaaattttaactaagttcagatttagaagtcattttatgtagatattattggaaaatatagatacatttgttagataattctcaatttaagataagaaaaacttaaaacattttgctctctgtagcaatttatattcccagcaggggtttagccttaagtagacagacataccaatctgtgaaactagaagggactataccttactgcctgtaaatttcttcagtgttaaaaaagatagttgaagctttctatcttcattttccacacttaaagtggcttatgaaaactattaattttatatttaactatgtcatatttgtgtgtggaacattgcttttagagacaattattaaaagaaatctagatggccaggtacggtggctcacgcctgtagtcccagcactttgggaggccgaggctggcggattgcttgaggtcaggagtttgagacagcctggccaacatggtgaaaccccgtctctactaaaaatacaaaaaatagctgggtgtggtggcgggcacctataatcccagctactcaggaggctgaggcaggagaatcgcttgaacctgggaggcagaggctgcagtgagccaagattgtgccattgcactccatccagggcgaaaaaagcgaaactccgtctaaaaaaaaaaaaaatcaagatatagaaggaagtaaatgatgataaagcaagataagagaaagtagcagactggattctgatttaactcagcaaacagtataagtactaaaagacaaagaataagatttgatggttgtcatcaaccaaatttctatttattataataaaaatttgaaaaaattattaacactgaatttgctgagatttattatgtgagggacatattaatgcatttcattgttcttttacatgcactacctcatgtaatcctcataacaaccctaataggtaggcaggcttaggtaaaaataatcttgagtcatattttgtaagtagtataacagaggtatgtctaaaacactttacttttttttttttttttttttgattaggagtctcgctctgtcacccaggctggaatgcagtggcatgatctcggctcactgcaacatccgcctcccggtttcaagcaattctcctgcctcagcctctcgagtagctgcaattacaggtgcctgccaccacgcccagctaatttttaaaatatttttagtagagacggggtgttactatgttggccaggcttgtctggaactcctggcctcaagtgatccacctgcctccctcctaaagtgctgggattacaggtgtgagccaccgtgcccagctacttgacagtttttgagttaaaaaaaaaaaaagctagttaaaagccttcctccagtaatctgacatgctgatgtttttttcttatatacaaaatgttcacaaatattgacccacttctctaatttgtattctattttattgatcaagttgtctatttctgaatcaatgttgtgttttcttaattcttatatctttgtaatatattttggatctggtagggtacaattccaggctttgtctattcctgatcatttactcttctgtatgaatttcagaattatctcatcaagttccatggaaacattctacttggcttttgattaagattatgttgaattttcccagctactcgggaggctgaggcaggagaatgatgtgaacctgggaggtggagcttgcagtgagccgagattgcgccactgcactccagcttgggtaaaagagcaagactccgtctcaaaaaaaaaaaaaagaaaaaaaaaagaaagaaagattgtgttgaatttataggttaaatcaagatcattatgttgtttataccatcaacatttcctctccatgcacatggtataccttcatttattcatatattcttgtgtgtccttcactcaacaaatatttttaagtatatactattttagagtactgttctaggtgttagggatacatcattgtttaaatgcccctactcttaagtagtagtttgtatttcagtgagggaagagagaaaatagagaaataagaaacaaatgtataatatgttccattatgatacaataaagtagggtataggatgacagaacaacggggtgtgtgtgtgtgtgtgtgtgtgtgtgtgtgtgtgtgtgtgtgtgtgtggtgtatgcacacacataccctgtttgattagcagagtcttctctgataaagtaacatttgaatcagggaaaaaagtgagccatgtgaacatcttgagaaaaagctgctttccagagggaacactggtgcaaaactgtgagctgggaagctgcctgatgtgctcaaagaaccgtacagagcccagcatggttagagtcgtgagagagagggagaaacattttgtagttttctccataaagatcttgaatattccttgttagatttattcccaggtattttacagcctgtgctctgaatgtctattttatgttctttccaaaactaccttttcaatttgttattgctgctgtgtaggagaattactgattcttgtatgttgattttatgtcctgttacataacttagtgctagtattttagcagttgattctatttgtttttttaaattaagtgaaaatcttgtgtaatgactatttgtctccatcctagactgttttattaatatttttttccttgtcttgttacatttctaggacaccccgtaaaatatgtactagtatctgtgaaaatgagcatctgttttcctttctctaattttaatgaaatgcttccaatttcataataagcatgatgtttgctatttctttaataaaacaggcaatatttcttctatttataatttgtaaggtttttaaaaatgaaactttttagcatctattaagcttgtgtgtgtgtgtgtgtgtgtgtgtgtgtgtaacatgttagtgtagtgaattgccttgatatctttcttatctggaactatttttcaattcttggtcacatactgattcaaaaaatatcaagtgcctacaggaactggtaccattctaggcacttgagttacgttagtgaacaaaacactcaaaaattcctggcataatgaagctgatattctaatgatggaaagcaaaaaaagaaaaaaaccaatacatataataaatgaaatattgtatttttcgttagaagagataagtacaatggcaagcggaaggagcaaagcatataaggagcagagtgtgtttggggggtttgtactctcagttagatgggctgacattgtgtggttctaagcagaggtatggcatcacctgcctgtgcctctgcgggctcactctggacaaatagactgtgtgggggtgtgggtggcgggtgagcaaaggaagcaaatggagacatataaagagcttattataggaatacaggagggaggtgattgagactgacttggtggatggcagtgggggtgaagaacatccacttctattttgaaatagaggtaactggatgttttctgaccaattgcatacaaggtgtgagaggaagagagagagaggttgaggtttttggcctgagcaacctgatcatgatgtttgttttaataaaaagctagatttgatttgctaataatttatttaggacttttacaatgttgctcataattaaaattgtgtgagaactttctgttcttccatatcccttgtctggttctattagcctttaaaatacgtagcataggccgggcgcggtggctcacgcctgtaatcccagcactttgggaggccgaggcgggcggatcacgaggtcaggagatcgagaccatcccggctaaaacggtgaaaccccgtctctactaaaaatacaaaaaattagccgggcgtagtggcgggcgcctgtagtcccagctacttgggaggctgaggcaggagaatggcgtgaacccgggaggcggagcttgcagtgagccgagatcccgccactgcactccagcctgggcgacagagcgagattccgtctcaaaaaaaaaaaaaaaaaaaaaaaaaaaaaaatacgtagcatagtgttttctatgtttgagagcagcttggctacagttagttttcttttacttaaaactttggttgagtttgctcaaagagtcatttggacctggtcaggtagtaggtcaatgagtcagcatcccccagaccacccccaagtttggtgatttgctagaaggagtcacaggactccatattgtgatactcatgactaagatttattacagcaaaaaaaaaaaaaaaaaaaaaaaaaaaaaaaaaatccaaagcaaaatcaacaaagggcaaaggcacatggggcaaagtctggaggacactgggcacaatcttccaaaaattctttcacagcgaagtcacacaggacaagcctgattcctccagctatagctggacacatgtgaagtgttatttgccaggagggctccagtctgtgcctctgggtgtttgcagctttatgtcccttctttgtttaggtgctgtctcctatctttgaaggattcctaatagtttccctgaatttgaggtttactgaggattcttcctctaagtttcaacaagctattttgtaatttctaggaatttggggtgggaaggagagatcatagcatgttctaaggctaccatcttggccagggaggctctttttgtgttactgagtaggcgggtgaacaggaagcaggaaggtgattgaaagtcagacgtatccgtctgtcatgtctgtgctcatctctgctcccctgacaactaacaaacccgttgacttcattgcatttcagattcctaacctgtaaaatggagatcactgtagtcctgtgaagatgaaatgtgttcaagaatggtagcctcctatttactacatattgatgcttaacaaactgtttttttccccttttttggtcaaataaaatgaaatatactgttatacaaactgagctgaaaacatgtagaatccattacccacaaaagtttgtgtagtatgtatacataattatgtttgaaaatcatttaaataaggtctttgtggatagattcataatggagagtcaaggagacccttgggatgcttgggaaagtatctttaatattttgaagacgtcattgtggtagaagatgaccttcatcttgcacaatgccctcatgtgactaacagcaggagaacatcgactattggttgatccactaagttctttattatgctgttacacagggcaggggccagagcaagttgcacatgctgctctgctttgtgcttgtcacttgccgctccagccaggccacatgagcttgagaacggcttcctgttttatagaaaggccatgagtgcacagggaatgacaaaacggaatgactaggtatggcaatcctacttgcttttagttttctatacctgttactcagactccttgtctaggcaattgaccctcaatttccagaccctgcagtcatttgtggattgcagtgcttggtttcctgtcctggaaacctgatctccctggatttcaggactcttattatatactaaccttggcagttgccctttccttccagacttgcatgaagttgtcaatgagaccatcatgtgggagagaataaaaatgcacgataaactaggaaatagtcagtgtggcactgtgaagacaaatcatggcagacttatttcatttcttctctgatagagtgacaggcatcataaacaagggagagtaatgggctagatctatcttgcttccctgtaatcactcctgaaacactcaaggtatgactgggtcatattttatatttccatatagatgagaaacaggatctttgtcatagggtctgattgatctgtctagtttctctgagattccacatccaagccaacatcctggataagttgcactaacaaaaaatcagagcagcagaatttaataaagaattaaggagagaagactgtctagaaagacagtgagacacatcctacatgtggaaagtatagtcagaattcaggaagggattgggattgtaaagttaagaaaatggattagggttgaaaatgcaagctgaatctttacaaagaattcaggaagaattgagacagtgctatacgttgttcattgcaggatacattttttattttgcttttgagacaccctaggtaaggtacttgagaacactttggggtcggttggattctgattccttctcaagtacagtaaactctctttacagatatatacatttcttgctgatgaggaaagtggaatgagaaagaatatggatgtcaccataaaatgagacaagaaaaaaaaagttttgttatgtttaaaaaactctcctaatttgtattctattgatggtgagtaaacaatataacccttacatgtgaagagtagtctattcatttctctttatgaatttaacaatatcaattagaaagccaaaggggaaaagcccatctatattctatttgttgttcaacagagagagaaatgagttgtacatttttagtatctgaccttttttttaaaggaagatagattattctcattcttaatggaaacctgtgaatagtgttgatccaagtgaaatatagatttttgtaaaagagaggaaagggattttgttacagaatgagcttctatgtttcctttacatcttggctcaatcactatttcattagagaagccttctctgacttcccagacaaggtcagctcaaccttttctatattctcacagcaccaagtatgtgcgtgtctgtctgtgtgtggttacacacacagacatactatatttgtgactcttttacgtgatattcccctttagatagactgtaagctccactgaacacaggaaatgcacatgttttggctcatctttcctaaccaaagcctagcatggtgtctaacacctaatacactctcaataaatgaatgagccaataaacagtgaatgtggtctagatattaaaatgctgagaaaaccctatgcagttgaatagaactatattcattgctcatgaaaggagattttacttaaaagttttaccttagatgtgctacctttttgagtaagggaggcaaattttcaaacctatgggagagttagggtggggagtaggagacagcactgccacattctgggtgggtgagagctggatgtgaagtgggcctggtgccagtctcagtcttgacctaattttgataactgttactgaacacgttgctcttttatcatggcgttgaaagcctatctaaaagcactctgtgggacctttagatatagcaagtgaaagggatcaaagccctgaaaactagacattgttggctcaccctggaaggctggcttcagtaacactgcttccctcttctccactgacaactggttcactgagcaggaagttgggattaatttactggagagcagggaaggtgacaggatttccacagcaattgaacacatttagcagagaaatgttctaaccattggtgacttcatgatttcctctttcttgggaaagtccaagactcttacctaacatttgtcatccttctcccctgcccccctcaatgaaggagaatgatagaaaggagatcttagcaaaaaaaggaaaaaataagaacaaatccaaacttttatcttatagttactatggaattaagtccaaaaatgatgctggctttcatggcaaacatgcatacttctctccttccatagcctcagtttctgtgccttattattgtttatattcattaataattttagctaatagggttattatgcaaatgttaccaggtgtttttatttgaagctaaaacaaaacaaaagaggtttaattgtattctgaaggatctaatgaactggggaggctttgagttctgaagataggacaaaaaaagaagatggggctacttgtttggtgaggtagattttcttttcttagcctactaagggtataatgccatcagaacctgaagcgtggcttggtgacttttcaaagtctctaccagctctttgattctgtgggcaataccgaagaaatacactgatactcaaaaatgcaactagaaccatggtagcgtatattttgaattttataaatgagtgtcctttattttgtaatctccgaggttagttccatttgcttctaaacttcctttgatctaaaaagcaaagcttgaacatttgacccagctattaacattggtggtagggtttagagaagtcagacataatttcagatgcaggatatgcatttggcttgtcatgggggaaaatgaaatgagaagtacaccccaagtcacaattcaggcctttttatttgatcaaagtccagccttgtagtcatctttaacagccactgaagcctcagtgtagcatttgtgaaaaatataaaacatgataaatatgtctaaaagaaaatgttttttctaactttgatgaaggcttactttctgtgacatgtatgtgcgtgtgtgtgtgtgttgagtattggtggtgggtgacccaagacatctccacatcatcaggaagggtgtggtttacaaggaaaccattgaggaccataggggaagaggtaggggcatgtgtatgtgggattttgctgaagatgtgaggaactttttggttgaataggaaaaatcaaatgtaacacccactctagttaataagtctgactctaactaggttcatctgctttttcttctgtcatagtagcatacaagtgaggtagtatggctgaatttagcgtggagacccttcacttgtgtaacataataagtttatgccagcgaaggaaaaataggtacagtgactaagagaaaatagactggtaatttcattttcaattcgtaaataattcacttaaactaaaattatttataggccattgtggaaacaattactttttgacttatttgcattcttaatgaagacgatgtgagtttttgagtggcttgcatttgtgacaaatgcatcaggtatggtcttggaatatttttgtagaaatgccataatttctgacatattggaaaatcacactcttaattgaaccaaagatgttttagtttcttaagaaatatgtaaaaatgatatttttcatttaagaaaatagcgtgtgacctcctcactaaaatattttctgaaaaataaaaaaatatgatttataatataataaaattataatattagatctactttttagtattaaaactgtaatagcatcagtaatcatacattctgtgtaactttgatagccccacaaatggagagaattattctttcatctatatctattcattatttttctctttagatatctccttgggccatatgaatgatgcagtctagcttcatctttgtcagtatggaataggttttttttaacgtttgtttactattgtgctttgacacattccctgctacttctagattctattttctgagcacccaatgactgtcagcatcctacacgggctaagagaatgcgacaactgaagaggaccttacatattatctgaccaaacgcttatgaaaccaaagcttagatatacaaagtcatacaacttcttctatatttactttaactgtcctcctagttctcatatttttttccaatttgagaatagtatgtgttccttgcttcaaaatggacagtcgctgtattgggtcttgtgcctaccctttcttggagaaacctaatttccataatgaacatttgacatattttcaccctgagatttttagcataatacagatgaggaatgaactgagatttggtagtacaagggtgtgtgtgtgggtagtggtgaaggttgtggtttgagaagtccatcttttatggagtgaagagaaggaagacaggcctattttttcatttggcaaacatttgctgaagggctactgtattgtactcctacacacaaccatttattattccgaaataataggcttggtggtgtttcagttttcagatttttaaataatttgtgaaaaatcacatagttgtcatacatttattcataactgtcttatgaaatagatattatcgcagacgtggtggctcatgcctgtaatcccagcacttggggaggccgaggtgggtggatcacgagtctaggagtttgagaccagcctggccaacatggtgaaaccccatctctactaaaaatacaaaaaattagccaggggtggtggcaccgcctgtaatcccagctactcgggaggctgaggtgggagaatcgcttgaaccctggaggtagaggttgcagtgagccgagatcgtgccattgcactccagcccgcatgacagagtgagactcttgtctcgagaaaaaaaaaaaaaagacatagatattattatccacatttttttcagataaaactgatacaaagaaaaattaagtgatttgcctaaattcctattgctaactggaggtagagctaggatttaaatcagctttttctgactaaaaaattgggctcttacaaaatatactatattgcctgtattagactcaacctatgctggtgttagagagatgaattaagtcatagtgtctaagcattattttatataaaagaaagaaaaactactattataatcacttcccataatgtctactttttaatttgtatttattgtacaatttaaatccctacctttcaccacatagaaaaattaattcaagatggattaaagatttcaatgtaagacctcaaactataagaatcctagaaaaaaaaaaactaggaaacaccattctagtcatcagccttggaaaagcatttatgagtaagtcctcaaaagaaactgaagaaaaatcaaaaattgacacacggggaactaatgaaactaaacaggttatgcatagcaaaagaaaccatcaactgagtaaagtggcagcctacataatgggagaaaatatttgcaaactacaatgacaaaagtctaacatccagaatctgtaagaaacttaaaaagttgaacaaggaaaaaaaaacccattaaaatgggctaaggacatgaacagatacttcttaaatgaagacataacagcagacaacaaacatgaaaacatgtgccacacctctgatcatcagagaaatgcaaatcaaaaccacagtgatacaccatctcacaccagtcagaattactgttactaaaaagtaaaaatagatgctggtgaggttgcagagaaaagagaatgcatatacattgttgattggaatgtaaattagtttggccattgttgaaagcagtataacaatttctcaaagagcttaaaacagaagtgccatttgacccagcaatcccattactgggtatattttcaaaagaaatccaatcattctaccaaaaagacacatgcactcacatgttcttcacagcactattcacaatagcaaagacatttgatcagcctaggtgcccatcagtggtagactggataaagaaaatgtggtacatatctaccatggaatactacacagccataaaaaagaatgaaattatattctttccagcaacatggatgcagctggaacccattatcctaagtgaattaacccaggaacagaaaactaaatactgcaggtttccacttttaagtgggagctaaacattgggtactcatggacataaatatggcagtaatagaaactgggttctactagcttggggagagagggagggggcaagggttggaaaactattgtgtactatcctcggtatctgggtgatggaatcagtcacaccctacacctcagtatcacacaatatacctaggtaagaaatctgaacatgaaccctctgaatctaaagttgaaaaaaacccaaaaataaataaatgaaaataaataaaaaacattttaaaatcgaataaaacttttgggaatgaaaaaagtgatggaggctggacacagtggctcatgcttgtaatcccagctatttaggaggctgaggcaggagtagtgcttgaaccggggaggcggaggttgtattgagccgagatcatgccactgcactccagcctgggcgacagagcaagactctgtctcaaaaacaaaacaaaacaaaacaaaaagataggaagcatttcatgtatactatcctgtaaagcaactttttaagtcttttgttcatttttattgggttgtctctttaattgattcgtaagcgttctttctatattctggacatattctttgttgggtatatatgttacaaatatcttctccctgtgtgtcacatgtgttttcattatcttatgggattttttttcaaaaacttttagttttgttgaccctcctcatcatatctttgttttcttcttcattaaaatttgctcttatcttactgatttccttcattaaatttcttttcattttttagaaaactttttcatttggatgcagagctcatttattttcaagctttgatttctttactgtaaatatccactacttactgtaacttagctttaccaccaaatttaacatgtggtaccataatcatcttctataagatacagcattattttatgtaaaagaaagaaaagctgctattataatcacttcccataatgtctacttttttatttctatttattggaagatttaaaaattttgttgaaagacataattttgccatatattcttcttgtgcatacacataaaagtatatataaaaataaattgcttaagctattcattggttaagctatttattaaacttccccacatacaaattccaactcttctgaatttcttcacattatgtaattcttatagtatccgttacataatcaagagcatttcctatagagtgctttactattttccctgggatttgcttcctaattgttgacaattattctgtgagttttgttgctggtactttattgatcttactagaaatatgctactggatttttttggtcaacaaacaggatttctatttcttcctcagatggtcctacaagtttgcagactgaaacatggagaatgctatttccttgtcactccactgggaataacaattgcttatatgcagatcatggcaattatgtcatctggccaacgataattagaagtcgttgttgattacaagatacagtttgatttcagagatattaaaatatgaaaaaatatgtgccttaggttagacatttagacacaaggtcctgttccaagaattaaaaatttttttaattcaattttttttttttttttgagacggagtctcgctctgtcgcccaggctggagtgcagtggcgggatctcggctcactgcaagctccgcctcccgggttcacgccattctcctgcctcagcctcccaagtagctgggactacaggcgcccgccactacgcccggctaattttttttgtatttttagtagagacggggtttcaccgtttttagccgggatggtctcgatctcctgacctcgtgatccgcccgcctcggcctcccaaagtgctgggattacaggcgtgagccaccgcgcccggcctcaattttttttactgtatagatttatggggtaaaaagtcatgttttgatagaagtgtatacattatggaatgaataaatcaagccatttaacatatctgtcaccttatttatttatttattttttggcgagatcatttaaaatctactctcctagcaattttcaagtatacagtacatgatttgttttcctattttgatgtcttctttcttccttgacccatacataggttattggaaagcttattttaacattactgtacacatgagtttttggattgttttatttttgctattaatttttaatatttttttaaatcagaaagtaagttattatacaaatgtttttgaaattttcaagacttgctttatgaccatgatgtggtgatgtgctttttgttaacattcctgaatgctttagaataatgaaatttttgtgggttgtgaattgtgttgtccaaatctgtaattatttagaaaaactgtatggtaaatcactttttaaaataaatgtgttaaaatctccaattacttttgtgaatttttcaaaatctccctttacagtggcaatttatattttatatatttgaggctacgttacaaggtgcataccaatttaaaattatgtctccctggggaattgaaattttgatggatttctaattatcatccaccaactattaaccattaataattatgagtaattacatataactattctgcatataatttctattatgtagcaataatttatgatacctctatccattatttttacattattgtatctctagcaatatttgcatttatgtctagcaatgacttgtagattaaggaacattttgtctgctattaataccagatttattttgctgagtatttctctgtatgtcatttttagacattaacttccaatgttcttatactcttttgaatctcttgtaaacagtacatagttatatttttttaaaaaatcactttgacaatttttgttttaacctgttgttagtctatttacattagtttgaattgccaatacatttaaattcatgtctgtaatcttactttgtgctttctgttttcctttagaatgacttttttctcgtttactattttgggagttaaaatctccaagtctattatttcagcgatttctttagatatcttaatgtgtatgcttaacatagtctaatgttaatgagtgtctttaccttcttccagtgtaatgcaaaggctttaaaacaaaatctattcattctcttctgaacttttatgccattgttcacttctgttcttttagccctttctatttagttttaactccagaaattagacatcatagttattattttttctcttactttctaaaatgtcttagaatttaacagtttattacattatatttttcaacctgtgttcctaacatattctaagatacttaagaccaagtatctggtcttatttatttttcattggtccccagtgcccgggcaatgccatatacttagcaggtgcttaataaatacttgctggctcattgactcagcatccaattatactcatgagtttcattaaatgagaaattttcacatccaaattaaaacatttaagttttttttcctctgtggttagtattggtttgccatgctccatttccatgggactgatttaacagaagtttcaattaccacccctccccctcaatttgttgtgggaagtggtgggtggaaagagagataacaagaaacaaagagggaacacaaaaataccactgtattttgtaactacgtgaaaaatggtaaaactaaaatagtttcatttttcatttgattttttttaacctaactgtgttcttcctttttcacttattgacatctatcagttctcataatattcctgtgctgtagaagaggcagtaatacattttattcttgggccttgttctgggtcaaacagggccatggtagagctaagacaaagttcaattctcctttctctttatccgtgcagttttttttccccccatattccagcatattccaggtaaaaagcttctttcttctgtgtgggttgagcactcttgttaagttttcattcttctctttgttacttggttcatctagaaaaacatttctttcccactaataaaaatacttttcttgccttacaatacctgacctaagaatagcttgaaaataaacctgaatttcccttaagataatgtaataaagggacaccagatcagacatctgttactcattacttataatccatggctaaaagtcatgctaataaggagttattgctatttgtttctcagatgcttgctcaagagactcatgcattgtctttagtcattttcactttgcttgtgatgtcagtaaagcattagcaaaattggaaacactggctattaatggggaggaggggactcccaccataacacaatttagtgatcaaaatgtgtcagttctagccactgctcacagtgaccatgagttacatttctcagttgctgaagagcgatttggaattcttagctttctataattgttttgttttaaagagaggcaggctgcttgttatgtatattcctcatatgtggctgtggtgatattacttatttatgtgcccctcaactaacaatgccattgttaagttgaaaatattggaagttgaaaatgcatttaatgctagcaatgcagtattgtacatacacaatctttgacaatgtctaaatattccgttgagattatttattgtattaagttgtatatagttactgggactgaaaagactcaacaaagggctacctgtgacctcacgaaggtctttgtttctgaaaaatctttaaattctgatcaggatacctataaagaaaaaaaagcaattcacttcatactccatatgtcagatagcaatttattgtgtgaattctgttgctggatggacaacatgtgctatgttgattgtaaaactgaaccgtgaatctaccttaggaagaattttgaaaacatacagattaatctatttttccttttcctttaaggatactcctcatggtaagaggaaggtgaaagggaggctccttcacaatttcaaatatttgttggcaatgtgaaatgaagaattgaagtagctataccaatagtaggcctccatcttgtactcactccccaatcctaaagcattttcatctcagttatctgcaatttgctgaaaaaagtgaattgaactgtttcactgtgttaacatatataggtccttatgcagccaaacagaatggaagtctggttgattcataggcttagctgtaggtggcctattgacatttcaaatagaaagaaggatttgcttggagctactgatgactattgctgctgctcttttccttttagactgtgaatgttaccatcagggaaagtaatttttcttgggactgttgctgtaggttccctgcttctggacatatatatggactattgggttgaaaacacagtagaaattttcatcatttttgcctactgggaaagcttatgatgtgaaaacaatttctttcttatagtcccccacccttaattattatttttccctactgtcagggtaacttaaatttttacctaaatgaaattaggggtatatctgcttcaggagttcatagaaggcagagttcaaagtagactaggctatccatgtgtgctacatagaggtgttcctaagtaatgctgatgaacctttacaaaatatgtctttggagtctaagttctaccactagattttttaatgagaaaaagacatcagtctttggcttttgttaactttcaatgtctccttgtcatctctctgaactgagaaggctataactataggtatggcatatggtgcatatttatttgttttttactcccatactgactcaggaaatgttttgcttcattaaactcatgatgctgacattgggaagccaaggtgggtggatcacctgaggtcaggagtttgagaccagcctggacaacatagtgaaaccctgtctctactaaagaaaatacaaaattagctgggtgtggtggcgcatacctgtaatcccagctactcgggaggctgaggcaggagaatcgcttgaactcgtgaggcagaggttgcagtgaactgagattatgccattgcactccagcctgggcaacaagagcagaactttgtctcaaaaaaaaaaaaagtcatgatgctgaatgaattattattgactaatagagttcttaatctgtactgataccagaagggttaaatttgtggggtactaagtcatcagaatctttctataatttcctaggtgcataaaaaaattaacaaagaacacttaattgtaatatgctaaaatatctcaaaaatagatgtaggaaagaacgttgccatctcacatatgcaaagcttaaaggcttactaagagttaattgagcacatgggaattatatattatttgtaattttattagctgagtctaaaaccaaagaaaggctgaatgtcaactctcctttcattattaagttcagtgttatgaatttaaggtctttggctctgtttctgagttatcattagagtagattataggattcgttatctatagattcccagctgtagaacagaggggaatgtattcatttagagttttagaaatgaaattaagaagagttgtcttttgaaatatctgaaaagtttattgagctttggtgagtttaatttcagtgcatttaatgaaagtcaaaggtggattcatttagttaaggccatcagatggagccaactgttctgtgcaaagagaaagtaagactggaaaaatgacatacaattaaccttttgcttgtaattcagcaaatggtcaggcaaaagctatatagaattggttggatgttaatatagtagaaattattgacaactgacctcagcttccaggttgttctagggggtgttgtttgaatatggtgatataagtaaagatatagtaattttctggaataagaaacctggattaattcattggttctgccacttgagatggagggaatctacatgaggtagatgaacacatacacacttacaaacgtgcaggagcaaaataaaagaaaacacttaaattgcttgattgatgacagtgtttattatttactagtctgaattcttccctttgcactcctacagtttccggtccataggagtatagatctctcctctttaatacttagattcagtgtgcctgtgtgcgtgttttgtgatgtgatgtcttaaaatatccagcacaaacgtatctcagagatattataggttcaattctaggccacctcagtgaagtgaatattgtaatacaatgagtctctcataattttttgttttcccagtacatataaaagttatgtttacatgatactgcagtctattaaatatggaatactattatgtctaaaaaacaatgttcataccttaatttaaaatgctttcttgctaaaaaatgcaaaaaatcatctgagtcttcaatgaggcataatctttttgcgggtggaagatcttgcctcaacatacgtagatagctgctgactgatgagtagtcattgctgaaggttaaggtggctgtggcaatttcttaaaataaaataaaatgtttgcatgcagtcttcacaaaagatttctctatagcatgcaatgttgtttgattttacccacaatagaacttctttcaaaactagagtcatttctttcaaatcctgctgctgcttgatcaactaagtttatgtactattcttttttttgagttggagtctcgctctgtcgcccaggctgaagtgcagtggcatgatctcagctcactgcagcctcccaagttcaagcaattctcttgccttagcctcccaagtagctgggattacaggcacacaccaccatgcccagctaatttttgtatttttagtggaggcaggatttcaccatgttggccagactggtcacaaactcctgacctcaagtgatccacctacttcggcctcccaaagtgctgggattacaggcttgagccatcatgcccggccatttatgtactattctaaatcttatgttatcatttgaaaaatgttcatagtatcttcaccaggagtagattccatctcaaggaaccactttcttcacttatccgtaagaagcaactccttgttagttagttttatagtgaattcactgcagaattaaaatgctccagttctaattctagttctcttggtatccccaccacatctgcagttactccctccactgaaatcttgaacccctcaaagtcatccatgagggtcacaatcaacttcttccagactcatgttaatgtagatattttggcctcctcacatgaatcatgatgttccaaatggcctctagaatggtgaattctttctagaaggttttcaattttctttgcccagatctatcaggggaatcactgtctacactagctatagccttatgaaatatattatcttaaataataagacttgaaagtcaaatttactccttgatccatgggctgcagaatggatgttgtgttagcaggtatgaaaacaatattcatcttcttgtacatctctgtttcagctcttaggtgaccaggtgcattgtcagagagaagcacccttttgaaaaaaaaatttttgggggggtacaccaggtctcaacaataggcttaaaatatccagtgaatcatgctttaaacatatgtgttgtcattcaagctttgttgtcccatttatagggcacaggtagagtagatttcgcataatttttaagacctttgggtttttgcaattgtcagtgagctctggcttcaagatgaagtcactggctgcattaactactgacaagagagggtttgaggttttgaagccagacatgacttctctgtagctatgaaagtcctagatagtatctccttccaaaagagggccatttcatttacattgaaaatttgttgtttagtgtagccatttttaccaggcatcttggccagatgatctgaataacttgctgaagcttcttcatcagcacttgcttcaccttgcactttcatgttatggaaatggcttctttatttaaacctctggaccaatctctggtagcttgcaacttctgcagcttccttacctctttcagccttcatacaattggggagagttagagccttgctctggcttagtctttggcttaagtcaatgttgtggctgtttgattttctatccagatcatttaaattttctttatagcagcgataaagctgtttctctttcgcattatttgtgtgtttagaggaggaacacttttaactagttcttcaagaacttttcctttgcattcacaacttggcttattttttgttgcaagaagcctagcttttggactctttcagcttttggcataccttcctcactaagcttaattatttctagcttttgatttaaaatgagagatgtgggactcttcctttcactgcaacacttaaagaccattgtagagtgattaactggcctaatttcaatattgttgtgtctcagggaacagggagacccaagtaggggaagaaagacaggggaatggctggctgatggagcattcaaaacacaaaacatttattgattaagttcactgccttacattggccaagtttgtgacatccctaaacaatcacaataatatccaagattaccaatcatagatcaccataaaaatatgataataatgaaaacatttgaaatattgtgagaattaccaaaatgtgacacagagacacaaaatgagcacatactgttggaaaaatgacatcaatagacttgcttgatgcagagctgccacaacctttaatttgcaaaacgacagtatttgtgaagcacaataaaatgaggtatgcctatatagggttataggattaggggcatgatgtttagtttcaagtcttttttttttaacttttaggtttgggggtccatatgaaggtttgttacataggtaaactcatgtcacgggggtttgttgtaccgattattttatcacccaggaatgaagcccagtaccaatagttatcttttatgctcctctccctcctcccacttccaccctcaagtagaccccagtgtctgctgtttccttctttgtgttcataagttgtcatcatttagctcctacttagaagtgagaacatgcggtatttggttatctgttcctatgttagtttgctgaggataatagcctctagctccatccatattcctgcaaaagacatgatctcattgttttttatggctgaataatattccatggtgtagatgtactacattttctttattcagtctgtcattgatgggcatttaggttgattccatgtctttgctattgtgaacagtgctgcagtgaacagttgtgtgcatgtgtctttatggtagaatgatttataatcctctgggtatatacccagtagtaggattgctggtttgaatggcagttctacttttagctctttgaggaatcgccatactgctttccacaatagttgaactaattcacactccctccaacagtgtgttagtgttcccttttctctgcaacctcgccagcatttgttattttttgactttttaataatagctattctgactttttaataatagctattcagagatggtatctcactgtgattttgatttgcatctctctaatgatcagtgatactgagtttttttgcatgtgcttgttggctgcatgtatctcttcttttgaaaagtgtctgtttatgtcctttgcccacttttttttttttttttttttttgagacggagtctcgctctgtcccccaggctggagtgcagtggcgcgatctcggctcactgcaagctccgcctcccgggttcacgccattctcctgactcagcctcccaagtagctgggactacaggcgcctgccaccacgcccggctaattttttttttgtatttttagtagagacggggtttcaccgtgttagccgggatggtctcgatctcctgacctcgtgatccgcccgcctcggcctcccaaagtgctgggattacaggcgtgagccaccgcgcccggccctttgcccactttttaatggggttgtttttctcttgtaaatttaagttccttatagatgatggatattagacctttcccagatacatagtttgcaaatattttctcccattctgtaggctgtctgtttactctattgatggtttcttttgctgtgcagaagctctttagtttaattagatcccatttgtcaatttttgctattggtgcgattgcttttggtgtctttgtcatgaaatctttgcccattcctacgtccaggatggtattgcctaggttgtcttccagggtttttatagttttgggttttacatttacatctttaatccatcttgcattgatttttgtatatggtgtaagaaagggtccagtttcagtcttctgcgtatggctagccagttctcccagcaccatttattgaatagtgagtcttttccccattgcttgtttttgtcaactttgccgaagatgggttatattaatttgatggctggttgaatcagaacatgtttatgaacttcgtcttctaatttttctacttagttttctaatgcctttttaaacaaccatctttaatacccatggataattagcttctctcctatgtagttatacattcaattgaaatgcaatagtactatgcaggataatttattaccatacagaattgttattgtgtagaatatggcacttaatgagccaagttttttctcacatccaaacattataggtactgaagtagtctgaatgtcagagtctggaatctgtcctggctgcttgtcttatggagattctactctcttaggaatcggagaggcagaggaatgggaacagggccagcatctaaaactccaggccggctctgtcagttaatgtgctcatcggctgctctctcgactactgcatcatcatcccccaatatctctgctcttagttgttgacttttcccttgcttcctgccatgtggctttgtcatgcatgatattcttctcctctgcaattgagctttttttggtgcagtctctgcttttcctggcttggcccccatgtgatgctctgctgggatgtaagctctgtgagggggaggttttcattccttttgttcaattctgtgccctcagtgcctagaacagtgtgtctggcaggtagctgactctcaatcaataagtatttgttgagtaaaatccttggacttttgtctatatctttttattttaactctcacttttgcatttccatgagtagcctttgtcatcaggtacataacttatatcacctagggtgtggtataggaactttagacaaaatctcctccttctcagagctcatgcacatccagccacttccagcccatgaatgtccactgcaaggacgttactgttgtagggtgttatcacccattagaatatgttgcagctggcacttaaggataaatttgactccaagtgacttttgcctgtcccagattagatattcttgtggctaagaaattcttaggttttatcggagagcaacttcagtaaatgcttagataagtgaacttatttgtctaaattctctaattgggttggggtcagtgaccttttctgtgatattaacaattatttttaggaagagggatacaggtccagatgaattatgcagatgtgtgacaggctttctgcaatcctaggaagtctacaaataataatgatattattatggtttgggtcaacatatgcacagaaacttgctttttaatatctggtgacactattcctgctcctgagaattaatctaatacagttatctgagtggaaccttaaaatcccataagacagagtcttataggaatatatgtaaaattagtttccaacttaaaaccaaaaaatataaaaatatagatcttattgctgaatggaaccttgagatcatctgtttcagatgcctgcccactgccaggttaggtgtaattcaaatttctcacaaatcatctatctgagactcagaggttgaatgattttcctgccaagggtgataaaacaaagttaaatttcatctattgaattacagtacaaaagagaatatacactctcataatttctgtttaaattctcctttcatagtaaccttttacaacaatctgcaacttcattagcacatcttatagtatgtgcaggactttcagtctgtatagtttcagtttgaatggaattaaaagataaaattaaacttcattccctttcttcaaagcaggaagtttatattcttggtaagacaaagcacaacaaatctaataaaataggttttattagtaggctgtaaaagttacctgcagagcctcagtcttgattgggaattagcatgccaacatttttaaatccctcttaggaaagtttcgaatgctcttagaaacacatgtgttagaattagtaaaaagatttataaagggagacagctgaaactaaaactaatttcatttatccttcttgttttaaggagtaagaactggaccctagcaggtgatgaggctacatagttcaacacagttgagaaaaaaagtgatgaggccccaaaagtttcatgtgagactactcaatagcaatgctaacactagaacaccttttttttttcttatgcagtaagaagctttaataataatttcagggtatgggcaaacaagaggtatgagcaaagcagacagtctggcacatcaagggcagctccatgggtcttttctccccacctcatacatgtattctctgacccagaagctggaacgctatattctgaccccagcttcaaggctttttccattttgatgaagtgagtccctccctttaagtcttaaatcttgtataatactcaatgttacctcatctagtgtgttcagtactgtggtttaacttcagatctatttagacacttcttttgttaaatatacacaaatgatttttgaagcatcagtaagaggcaaatttgttcttacttttttcttatacttctggaaatattcatcatatagccttcaaatactgacattgaattgcatgagctacataactttacatcttaagtcttgggctgtcttcatttatcattatagtttgcagcactaccagaatatctaactaatgcaattctgctcctcccttaatcaagaactgatttcgcttgtatcatttcctgctattgccaaaaagaccatacaaactggtattgctctgaagtctacttgaagtctaggctagcaggtgaaattgaatagacctgtattttctcggatttctgcagtgataataataaaataaacatctcatttcagtaagtagcataataagagtttaagcaaaattaggagcaaggggctaattatgtattttccctttacatgctctttatgccattgtcaaagatagaggattaagtcaaccaaatatggcattttgtttggcattttttgatgtatagaaatattttaacactcctgggaagtatgacttcccttgtcatcacgttcactaccggttctattcatatctaaatattctattattaaatgatatcatctaataaagtcttaactattctggtattagttcctcccttttttaaatcaagatacagtaatttgtatattttcaaagtgctttataaacctcaaactatactgtaccatagccaagtctttgaaaggaaaggcacatccagctatgtgtgtatgttagaataatgcccgtgttgacaggaaccatattctccctgaaaagtatgattgatgaagtcagttttcagacaaagagctcatgaccaatttctttcaagcttcaaatcaagcttgacaacatgaagaatttcacatagcatatgagaaatattcactttaccttttcaactggtatcacaatcattgtgggcttccagacacatgcacaccgcactcctggttcaagccataagaaaccctgtcatgccagagtgttagttcagtacagccattaaagagaacatgtggctgggtgtgctcttgaaaacatgaaccctgcaggattctgtttattgctagttttatgtgcagaccactagtccaatataaaaatcaaagcacaaattttcacgtgctacacagtattgcagtttttggccgaattgcttcgtgcttatctgttatcttttgggttgatgggttccagaggaagccagctgtgcaattagagatgtttgggcacatctgttccaaagttgcagcctgaagatgctcagagagtgatattcttgtgtgtgtgtgtgtgtgtgtgtgtgtgtgtgtgtgtgtcctctgcaggtgctgtgttttcaaggagagaagtgttcagcatgaacaaacatgactaatgattgtgagaggtttatttgcaaacagacaggtgttggcaacacagaatgtaaagcagaaattattacattagggaagtgctatgggatttggggctataaatattttcctcacagacccaggtctttcttctaacctttgtttttgaatttcaacactgtatttatttgtaaaacaattaacactgtatattaaactatctctcattaatgttatattttaattgtgcttctcccttctactacattatgataaataatgactctgaaacacaaaaggatgtttaggtagtgaaatcaccattctttcatcacatttttcttcttacactcataattgtttaaagaactcatttaattaactgcctctgctgaactcgaactccctgaaggcactggccatgccatttcatcttgtattcccactgtctgacacagtgcgtgacacataggaggtgtttagaaaacatataatgaataaactatgatgttattttcactgtttgttcaatatgtgtttgtcctttaaatatttaaaagttttgtcatcaagtatggtatgtaggagaattctccattagcaaataccttgtccaatcatgtaaataaagaacatgttttcctgtaagaatattttcaactattattcttcgatgattatttatgagcctggtcaatagtgaaaactgatcatcttagttattatatgcttactatgttctcaggataagggatatcataataattttagttaacataattgtcttagagctaagaagaactttagatgtcacatcaccccaagaggaataattaaggtacagaaaggtaaaaagcttgtctagtaacattagtaggttttggttttcagttgtgggtttcttaattatgttttttaaaaaaattggtgggatttcaagaatcttttttgagcattaagatcaagcatagaaatatcataattactatcattatccaacttactcttcaagaatttgtctttactttcattaattaaagtgaaatacttcttttatagagtactgggatttgagatcgttgttgttttttgtacactggcatcctataaagttatacaactagttcataaattgattatgtgcttttgtttgctatgttgtatttaaagcatttagtttgtgtctaattcactttcatgttgaaagtgacataattatatgttacagaattcaaatgaaaattttctcaactttgaatatgcactaattcaaactgaaatgttttcatctttaatattttccacattctgattttatcatctaaccttttactcctttgtggtttgcatttgccttctttttttaacagctggcacatttaaaaatatcacctacatacacatatctcaaagctgtatacatggaaagactagtttttttctttctttctttttttgagacagagtcttattctctcgcccaggctggagtgcagtggcgcgatctcagctcactgcaacctccgcctcccgggttcaagcaattctcctgcctcagcctctcaagttgctgagatgacaggcgcatactgccacacctggctaattttttgtattttagtagagacagcgtttcaccgtgttgcccagggctggtcgtgaactcctgaagccaggcaatctgcccaccttggcctcccagagtgctgggattacaggtgtgaaccaccgtgcccggccattatttccatttttaaaaattaattgttgtagtaattttcatttctaagtcaattgtttggaatgcaattcacagactcagagaaatccaatttcaaatatgggctatatccatactgagcgctgttagtgccgtattatagatacattgtgggttaaatagaattttttgagttattttcaagttttattataatttcactaagaaaaatattttaaattctaacacagagcttgaagaaaacatcccatttctgcagtactggtggttctctaagaggcaagaagggctgtggctaacagattaaatacttctgggactatttaatcccagaagtttataaacttgttatatctctgtgtctgaataagagaaacaactggctatgattatatacctagatgttgggatatagactggagcaaattgagatcaaatatgtaaattggggcaaaggacctttgcctctgtggcttaaagattcttaactcacactcctccaactttcctctttgtatctattgtgagccacttcttattattcattattattatattattgtaatagtattattattattattgtactacatatctgtggtggaaaaaaggacaacagtgtgtaacgtgaaaagtaaaagtctccctccaccctcattatcccatcattctactccacagaggtaattagtactattgatagattcttgtgtattctaacataaattttctgtatctgcaaatatatatttcatttaggtgatatgaatttcaatttttctttctgtatatgccatttataagtctagtattaatgaacactagattgccagcatcctgattttaaagtgtcctggaattttgatcttcttaatttgaattccatgagcagcagcagagttacccttgtcctgagcctagaagtcgtccctagttaatcataatcaccctccacagagaaaagactctttttttatttcaagtaaaatcattgcatttcctaagggtaagggactaattcatttactagctttccaaacaggactgctaaattttttagatacatcctaggtaattgaattctcctgaacttgggaatatatccaattcttactcaaaaagttgtcccgattggatcaaatagttaaatggacagtaaggatgtgggaaaagaaagataactcagaaagcaggcatctgctatttatctcccagattgatgagtgcaactctattagaagagtaagtactaattaactcattaaacagttcccagtgtgattcctcaatgtaattttaggtgaatctgatgtttagagatttaaaatctaactgtagaagcgtatcattgcaagctattgataaaactttcagagatattagaaacatttcttaggccataaagtagaaaggaagtaatataaagctaaaggctcttgttgtatagaaagtacttaaaaacttttttagcttagttttctgaatgctaagtcagatgaccaatatgagcttaaaatcccatgttaataagagctctgatggcttgggaatttgcatctgtgtccaattctgaagagttatgttcctcaattaaaatctacccaagaagcatgttcagcatgtaatctaatggtaaagcaaatttagtaaactacattaaaaaagaaagacagtaaaacgaatgttccataccctgttgtaaagcgattattgtatggatcagcatggtggccctatttctccagggcacatatagcatggattagaaccacaaaagcatgtggtcctactccacagtctgctatgcaaacctcagcgttgtgaagactgtccagttatgagtgtcatacaataagcataagtctggttactgagtgtatagcacattgcttgtgagacttggctaaagtcccatggttgtgcatgtcttggagcatagaaattacagcatgcagctcaatactagttctttcagtagagagaattcttagtttcctgaaaaagatctgtggtcttctcagatgatcaggagaagagcaatattgaagggttttcagttttttctttcttttttatttttgagacaggtatcactctgtcacccgggctagagtacagtggcctgatctagctcactgcagccttgaacatgtgggcccaagcctcagcttcccaagtagctgagactactggctcataccaccatgccccagctttttttttttttttttttttttaagaaatggggtttctctatgttagcccaggctggtctcaaactctgggcctcaatggatccttccacctcagcctcccaaagtgctgggattacaggcattgagccactgtgcctggcctcagttttttcttgaaggccccacaaatattgttaaatgtttaaaataagttttctaagagtgatagacatatagtggaccatcaaagttattttaggagacagtctattaatcttttcaggaactagggctttgaaggtagagagtctgatagtataagactttatcactcactagcagtgtgactttgagaaatgatttaatctgaatattctttttcgtctgggtctgtaaaatatggatacttatatcaaccatgcagagtactgttgtggtacaaaatgcttgttaaatggtacccatgactagtaatgtgcatagtgataatgaattgttttccctttctcatagcatgagggatttctactagaaatgagacattcttatataggtaaactcgtgtcctgggggtttgctgtatagattatttcatcacccacgtattaagccaggcacctattggttatttctcctgatcctctcccttctcccaccctccgccttctggcaggccccagtgtgtgttgttctgttctcatcatttagttcccacttatcagttatgtatcaggaaaaagaattttaaacaaaaacagaaaaaatataatggcttgaataggataaaagtttcttactaaaaaaaaaaagaagtgagacattcttataatgagggtttataaatggtgaggttttccatgaaaatctttaaacaagtgatgtgcatatagtttctgtttatgtacttcaatattgcttattttagaatctaagctcttgggggctaagcactgtgtcagggtatcattgactacctgtaatgccaaatatgagtagaaaaatgtggtctgttatgtggcctaaatggcgcttaatgcataagcattttattgaaggcttaaagatgtttccatggaatgttgacacaacagattgaaaagtgaccgatttaggtaaatctggctcttataaaatggctgtagttttgtagcattcttttctccctctgtgtcaatgtagagaaggactgatccatttatcagcggctggctggcactctatgcgggacctttgttagttccaaattctgtttggcaacaaacatccaggacttatttattttcatcttctaaaaataagtctatgtttctgagatcttttcaaatgaataaatactatactaaatttacagtgattgctcattattcaaccaaagagaaaacagtaaatattgagcatggtgattaatttgccactaatcatgataaaattattcacagtcctctcttctctgctcacctacagtctactttttcttatttctttctcttgtccccaagaacatctattcttattttaatatcgttctaaacatgtatgactatatgtagtttccagttccagaaaacagctgatgctcaataattgtttttttggcgaggactctcctggctgctgagtgccacaatatccagtgtgctcaatgacatcaaagaatttctcattccaccagcatttgaaaatcaattcctggtttttactcttttgccttgtgaaagaagttttaaaacttaatgttggcttttcttctttgaaaaactaatacttttgaaatctttttcctttaagtttgagaattcacagtggtatatggaattgagcacatgagtgtgcacgtgtatgtgtttttaaaaagaataggatttatagctctaatatataactgcaccactaatgaactgtcttttctagtgccactgtctattccatagaaaatataattacctatgtaatggttgctaataaagaaactgttgcaatgcccttgactatgaacgcataagtaggaattgaaatgaaatgtttagtttagtgtctcccacatatagtcaccatccaaaacttcactgaatgtaataatacatttctaatacaaaaaattaaaagtatattttttgaagcatatatgtattaaacacattgcttggtgtgcttaatgaaatgttttttaataaaaatgttcttatgtagcagaaagtagatacaaagtcctgctttaattctgtaaatttaaaaattatgtagactgtgttatgattagaagacatggatgacatttgcttttgtataatgagcaaatcataatgcacaactataaaaatagactctgaaatttacaaagaagaaacaaattctatggaaaaagatcaatacctcttataattagggaagtacaagttaacattaaattacaaatcaaattggcaatggtacagtgaattttaatgcctgatactgggtaaagagcagagtaagataactgtatcacgctacagatagtaatataaaaattggcacaagttttttggagagtattcgggaaggtccttcaggaggcttgaaatatgcctaaattacaagatacgtgactgtagatttacctttacactggaaataacctaaatgttcaataataataatttgcgggttaaagaaatcccattcatttattcattcattcgataaatattttgtctgtacttaacatgtggcagataatgttggagtctctggggttattgctgggaacaaattatttgtacatgattacataattagagtataatcacggagattacgtgggactgttggtcatatggtttaactttataggagactgcctaactagttttgcaaagtgattgtaccaatttgcattcctaccagcaatgcatgagagttccagttgctctgtattctctccaacatattctattcttagtctttatcatttttaccattctgattggcatgtagtagtatctaaatgtgattttagtttctattaaactgattactaatgattttgataattgtttttgtttttattagtcattagtatactgttttaataaagtatgttttgggctgactagtattgtaaaattgaagttcccagtacctcaaattcctacatcgaagttcccagtacctcaaaatgcaaccgtgtttggagacagcatcttcaaagagataattaatttaaaatgaagttattagggtgggtcctaatctagtacgactagtatccttacaataagaggaaattcggacacagatatacacagagggaagaccatgtgaagatataaggagaagacagccatctataggcaaggacagaggccccagaagaaaccaaccctgctgacatcttaagcttgaacttttagcatccagcacagtaagtaaatgaattattgtttaagttccccagtcttggtactttgttacagcagctctagaaaatgaatgtaaaggaccttcaaactttttgctcattttaaattagattgctggtttatttattgagttataagtattctttatatattttgtatattttctcatacaccacatgtattgtgaatatttgccctcctcgcctcagactgtggtgtgaattttttgtctaatgatatttggaagtggagaaagtttaaattgtcaagaagtccaattatcaatttaaaaaaatattttgtgattatgatgttctttagagataatttttactccaaagtgaacaagactttctcctatggtttcttttttttctttttttattttattattaatatactttaagttttagggtacatgtgcaccatgtgcaggttagttacatatgtatacatgtgccatgctggtgtgctggacccattaactagtcatttagcattaggtatatctcctaatgctattccgcgggatccccccccatccccacaacagtgcccagagtgtgatgttccccttcctgtgtccatgtgttctcattgttcaattcccacctatgagtgagaacatgtggtgtttggttttttgtccttgcgatagtttactgagaatgatgatttccaatttcatccatgtccctagaaaggacatgaactcatcattttttatggctgcatagtattccatggtgtatatgtgccacattttcttaatccagtctatcattgttggacatttgggttggttccaagtctttgctattgtgaatagtgccgcaataaacatacgtgtgcatgtgtctttatagcagcatgatttatagtcctttgggtatatagctagtaatgggatggctggatcaaatggtatttcaagttctagatccctgaggaatcaccacactgacttccacaatggttgaactagtttacagtcccaccaacagtgtaaaagtgttcctatttctccacatcctctccagcacctgttgtttcctgactttttaatgatcgccattctaactggtgtgagatggtatctcattgtggttttgatttgcatttctctgatggccagtgattgtgagcattttttcatgtgttttttggctgcataaatgtcttgttttgagaaatgtctgttcatgtccttcgcccacttgttgatggggttgtttgtttttttcttgtaaatttgtttgagttcattgtagattctggatattagccctttgtcacatgagtaggttgcgaaaactttctcccattttgtaggttgcctgttcactctgatggtagtttcttttgctgtgcagaagctctttagtttaattagatcccatttgtcaattttgtcttttgttgccattgcttttggtgttttagacatgaagtccttgcccatgcctatgtcctgaatggtaatgcctaggttttcttctagggtttttatggttttaggtctaacgtttaagtctttaatccatcttgaattaatttttgtataaggtgtaaggaagggatccagtttcagctttctacatatggctagccagttttcccagcaccatttattaaatagggaatccagagatatagatcaatggaacagaacggagccctcagaaataatgccacatatctacaactatctgatctttgacaaacttgagaaaaacaagcaatggggaaaggattctatcctatgttttcttttagaaatttctagctttagttttaccttcaggtctttgatctattttcaaaatttttacatataatgtgaagtaagaatcagtattctttttgttttatgtggagatcctgttgttctacctccatttattgtggactactgtcttttctctatttaattattcatacttcagcaaaatcaattgaccaaacaggtgtgcttctatttctggactctattctgtttcactgattacatatttacccttatggcaataccctgttgtcttgataaaggtcgctatatagtatgtgaggttttgtggattttattgtccaggatttatacatattcagttaaatttatccttacatttttctgctacttgattttttaaaaatgtcagtttttctaacttttcaactatttgttggtagtgtatagaaataaaactggatttttgtttgttctttttgtgtctttctatatgactatattcacttgtattgttcatattgcttttgatagatttattaaacattttctatttgtgcaatcatatcctttccatgtaaactatacgtcacctttctaattggtgtgtcttatttctttttcctgcattattgcactggataaaatttcaacaaaatatataatagaagtggtgagagtgagtatgcattatttactttgaatcttagggtaacatcttaagtctttcactattaaatatgttatcaactattagtttctcagagattccctttatgactctgaagatacttccatcaacatctagttttcaacactttgtttttttagacagagtctcactctgttacccagtctggagtgcagtggcaccatctcgactcactgcaacctccgcctcccaggttcaagcaattctcctgcctcagcctcctaggtagctgggattacaggcacatgccaccatgcctggctaatttttgtattttcagtagagatggggtttcactatcttggccaggctgttctcaaactcctgacctcatgatttgcctgcctcggcctcccaaagtgctgggatacaggcatgagccatagcaccaggccaacatttcttaaaggaaggcaataaaacctaatcaacaacgtaacattgacaatttctaacaccaggctggtcttaatctcctgacctcgtgatccacttgcctcggcctcccaaagtgctaggattacaggcatgagccactgcgcctggccacatgcatgtatctttataatagaatgatttatatttctttgggtatatacccaggaatgggattgatgggtcacatggtatttctagatctttgaggaatcgccactgtcttccacaatggttgaactaatttatattcccaccaagagtgtaaaagcattcctgtttctcctcgccagcatctgttgtttcttgactttttaatttctgagggctctgttctgttccattgatctatatctctgttttggtaccagtaccatgctgttttggttactgtagcctagtagtatagtttgaagtggggtagagtgatgcctccagctttgttcttttggcttaggattgacttggcgatgcgggctcttttttggttccatatgaactttaaagtaggtttttccaattctgtgaagaaagtcattggtagcttgatggggatggcattgaatctataaattaccttgggcagtatggccattttcacgatattgattcttcctacccatgagcatggaatgttcttccatttgtttgtatcctcttttatttccttgagcagtggattgtagttctccttgaagaggtccttcacatcccttgtaagttggattcctaggtattttattctctttgaagcaattgtgaatgggagttcactcatgatttggctctctgtttgtctgttgttggtgtataagaatgcttgtgatttttgtacattgattttgtatcctgagactttgctgaagttgcttatcagcttaaggagattttgggctgagacgatggggttttctagatatacaatgatgtcgtctgcaaacagggacaatttgacttcctcttttcctaattgaataccctttatttccttctcctgcctaattgccctggccagaacttccaacactatgttgaataggagcggtgagagagggcatccctgtcttgtgccagttttcaaagggaatgcttccagtttttgcccattcagtatgatattggctgtgggtttgtcatagatagctcttattattttgaaatacgtcccatcaatacctaatttattgagagtttttagcatgaaggttgttgaattttgtcaaaggccttttctgcatctattgagataatcatgtggtttttgtctttggctctgtttatatgctggattacatttattgatttgcgtatattgaaccagccttgcatcccagggatgaagcccacttgatcgtggtggataagctttctgatgtgctgctggtttcttgactttttaataatcgccattctgactggtgtgagatggtatctcattgtggttttgatttgcatttctctaatgatcagtgatgttgagcttttttacatatgttcgtttgctgcataaatgtcttcttttgagaagtgtctttttgtttgcctactttttgatgaggtttttttttcttgtaaatttgtttaagttcttgtcaatattatgagccatttttaagaaacacacgtttatacacaagatgctacattccttttattatgagtttccttgtgaagttaaaatcttctgtagtagtaaacagatatacaaagtgtcccgcaaaaacctcacttctttgggaatgaaagtccaggaggtaaactttagtccatgttcagttctttcttctgtgggaggatatgtttacttgttttaaatataaattatttttatcattagcctcaggagtttcaggtctcctgcatgcttaagagttagtgcatattgagaccccgaaaatatgatgtcatgttgcaagcctgggatcataattaaaaatagcaaaactagacccagatcagtccttggagcatggaccatcaattgagccatgcattcacagacatcactttgtgtctgtcagcagcagactggtgacagtcaccccttgaggcttgtagattctaagggctgttatcatttcttgttatttctagaccactttgttcctttcattgcggggaaaaatattgaggaggatttttgggcatgtataataaacagatagggaattgtattattttcttctataaatcttttcaggtaagtaaaaaaaataattgtttgatttcttaaatgccttcaaacgctatataattcaaagcattagataatttacaattatacttcccatatgtaatgtctgtgatctagccagtaggacaactcatttttattcagtgctcaagtgggtataatatattgacacatgcttgaatctgatttatatattgttcttattttcagataaatcatatgaatttgtctgcctaatacctgaaacaattacaaaaatcacttctttcactcaagagccacattctagacctatgcattggtaacaatataaagagctgtccttcatgtatcctctatttttaaattatcattattttgaaactgtcattccttttttaatagcttaaaacaaattaatttttacacttgagggtatataacatgccaaattagaaatttacatttgcattttaccattttctttctcttccttctcttcttcttcttcttttttttttttttgagtcagagtctcgttctgtcgcccaggctggagtgcagtggcgcgatcttggctcactgcaagctctgcctcctgggttcacaccattctcctgcctcagcctcctgagtagctgggactacaggcgcccgccaccacacctggctaatattttttatttccagtagaaacggagtttcactgtgttagctaggatggtctcgatctcctgacctcgtgatccaccagccttggcctcccaaagtgctgggattacaggcgggagccttctcttcttttttctgtcatttccactgccatctcaccatactccaaggtcctcatctatttgtcactacctctgtcagttagtagaaggcaagttcttagaacttttctatatgtcaacatcacaaatttctattcattcagtgcccttatacagtgtgcactgagctaagagtagattttttctttaagatggagtcttgctctgttgcccaggctggagtgcagtggcatggtatctgctcactgcaacctccgcctcccagattcaagcggttctcctgcctcaacctcccaagtagctgggagtacaggcacatgccaccacgcccagctaattttttttggtctttttagtagagatgaggtttcattgtgttagctagaatggtcttgatctcctgaccttgtgatctgcacgcctcagcctcccaaagtcctggaattacaggcaagagtaggaatttaaagataagttgtatcttccttcatttcttttattatttggcatagatatttcaatgtaatactttaattcttgctccttaacatttgccagaaccatctttagggaaaatgttgaattaggtatcatagagattctcttttttaaaataataccatagagtgattaaaaccaccagcattgggcatggactgagactattttttcatctctgtgttatctgtgcatctgacacgtagtagaaaccaaatgaatatttgtagaatcaatgaatgaatgaccaggaaatgaaattgtgaaagaatcaaagaggattttttttcttttcaataagctggaagaagcttgtatatgcttaactgctgattagaaaattcccattgaagggagaaatttactattcaaaagggagaagggtgagagagatgataacaggatttcttagaaaaaggaatttaatgggatcagagcattggattcactgaccttagggatgccactgaacacaaacaatgactcagtctgagattttcatacaaattacctattcttcctgattctgattagtcttcttctgagatatgtaggcagagccaccctaaaccaatccttgcctaccacactgcttgtacagcccatctcttacacactgatgcacatggaagcatatatgtccttccacatcctttgcttatgtccttgtccccctcttctcacatatcataacaagctataatgcacattttcttgcctaatgcttagggctttctattcatttcaattcctcattccccagaatcaacacagctaatgtgtggtggtgtcagaactacatcctaaatttccaacccaactctattgttttagacatatctctaaatgaaactgtaaatgagacatttccttgttttccacaaggagagttttattatctcatattaatggagaagtaattgaactgtctttcaatcgatatagcttaatacaaattttagctgttatgatgttggagccccaccaaacaactttagcaagtacttggaaattgctcctctgggaagcttttcttaaacccccagtattgggtttggtgcccctccagtgagttcgtcttatagcaccctatgtagcatttgtgacactgaacagaaattgtttaactggctactattaactacggtttccctggggatagatgtgatcttttataccattgtattttagcatctcacaaagagtctggtacacagatgataatcaatattgaataatacccaataagccaatcaaaaaatctgaagacaagagcttgacatgtttgacttttcattttcttcacaagtggatgttcaattgcagtgaaaacagttttcactgatatgttatataaacagagagagcctattttaagatcttatggctaatgggaacaattttaaagtgtttattgagaggcagttttagacaatgattcaaaacacaggatttggggtcagaatacctgtgttggaatcttgacttcataacttactagcggtttgaccttgaacaagcaacctatcctctccacctttaatttcatcatctctaaagtagaaatgataatagacctatgccagagagttttttttaaggttaagtgagtttataaaagttatatataataatgactgtacatgtattattattaaattgtgagcataatattttccaaaatactttgtattaaaactatgccttatattttccagtggttaaaggtttccatgcattatcctataaaagatactcactgccttgcttttattttacatctgaaggctagaaaaataactagatttataaatagaataaaacttagacttttttaagttaaaaaaattattacctatttttatgtgtgtgatctgccactactcagaggacttgactttccttctgtgccatgccattaggacatgactactttggacacataagcttctaatcaaatgattcattactactcacatttaaatataagaacttgattcttcagatgaagaagtcatgacatttgtatatatagcaggtaaaatatccatttttaggagaaattctttacatgtgattgctccaagcagtcaaaaaaaattaccatcactttatgaaatgcatgagaatatttacagaagtgtttccatgtatgtgtgtcaaagaaaccagtggaggctaatttgtatgtaacttgtcctaagcagatgtgacactgagtatttgattaattggccaaaatggtaagcttgttgggagacttataaagaaaagaaatttacttacttcctaaaaggtctcttttgcagtggctgtagcatacactcgaagtagccatggacatagaaactatagatgtattcagttggtgcaaaagtaatcatggttttgccattaaaagtaatgacattacgtttaaatcttcaattaatcttgagttaatttttgtataagatgtaaggaaggggcccagtttcagttttctgcatatggctagccagttttcccaacaccattgattaaatagggaatcctttccccattgcttgtttttgtcaggtttgtcaaagatcagatggttgtagatgtgtggcgttatttctgaggcctctgttctgttctgctggtctatgtatctgttttggtaccagtaccatgctgtttcagttactgcagccttgtagtatagtttgaagtcaggtagtgtgatgcctccaagacctaaaataataaaaaccctagaagaaaacctaggcaataccattcaggacataggcatggataaaaacttcatgactgaaacaccaaaagcaatggcaacaaaagccaaaattgacaaatgagatctatttaaaagagcttctgcacggcaaaagaaactatcatcagagtgaacaagcaacgtactgaatgggagaaaatttttgcaatctatccatctgacaaagggttaatatccagaatctacaaagaacttaaacagatttacaagaaaaaaaaaaaccccatcaaaaagtaggcaaaggatatgaacagacacttctcaaaagaagacatttatatggccaaaaaacatgaaaaaaagctagtcatcactggtcattagagaaatgcaaatcaaaaccacaatgagataccatctcatgccagttagaatggcgatcattaaaaagtaaggaaataacagatgctggaggggatgtggagaaataggaatgcttttacactgttggtgggagtgtaaattagttcaaccattgtggaagacagtgtggtgattcctcaaggatctggaaccagaaataccatttgaccaagcaatcccattactgggtacataccaaaaggattataaatcattctactataaagacacatgcacacgtatgtttattgcagcactgttaacaataacaaagacttcgaaccaacccaaatgcccatcagtgatagactggataaagaaaatgtggcacatatacatcatggaatactatgcagccataaaaaaggatgagttcatgtcctttgcagggacatggatgaagctggaaaccatcattctcagcaaaataacacaggaacagaaaaccaaacactgcatgttctcgctcttaagtaggagttgaacaatgagaacacatggacacagggaggggaacatcacacaccagggcctgtcagcgggtagggggataggggagggataacatgtagataacaggttgatgggtgcagcaaatcactatggcacgtgtatacctgtgtaacaaacctgcacgttcagcacatatgtcccagaacttaaagtataataaaaataaaattaaattaaaaaattttaaaagcacaatgtgataattgctcagaaacagaatgatcatgagaccataaagaaaatccaaaaatagaccaaagataaatatgaattaaatgaaggtaatggcaaaaacagcaattacttttgcaccaacctaataggtttgcatctcttgttacctaacttattacctacttgccatttggcctgttgccttggagaatttatgaattgagtaaaattgttgaatgtctgcagcatgtcagacactgtagtaagagacctgagggcacaggagaggaatcacactgggactgggcaagttcctggtgggaagaatgtggaaggcttgagtaaatcctcagggaagctgcaggatagactagctaccacatgacatcagataaagtgccttccaggcatagagggtcaggatttaccccctcactcaatgattgatttgttcattctgcattgattgcaccaagtcctgggaatattatattcaatttgacagagaacagccggatctcaaggagtttacattttggagagagcgtcaggttatacagacaacaagcatattcacaatccaatgtcaggtaggggtaagtgttgtgaagaacaataaagcaggttatgtgcatggcataagggggtttctgttttagacggtgacatttaggagacctgaatgaagttaaggtgggaaccatgtaagcatgttctatgtgtcaggagcagaaaatgcatagctcctgcagcaggagggtgccaagtgggcacaggaatccatggggccagtgcctggtgaggaggaagagagggttagagatgaatttggagatgaagattgtgcagcctttggttttattctacttgtgataagagcccctggaaacttttcagcaggtcagtgacatgatctgatgttattttaaagtaatgtactagctgctgtgttgagaatatattgtaaagatcaaaataaagaactagttaggaggctattgtagaggtatagggaagagatgggttgagcatggatggtagctgtggatgtagttaagaattggtcataattatgattttttggaaaaacattagcaaatgttaaaaactgcatagtgtataagaagccagtggttgaatgtttgtggagcttgagttttggggtgtgaagtatcagaagatgaaggtagagattaaacctgtgggtgttaggaagccattgtaggagattcagaaggggagtgacatgagcagatttgtgttttagccaatccgcctgactgcactgaaccttggtgcggcagaggctatttttacttatcacgtatctatgtgcttctctaccttttgcagcctcccatgctgtgggttggggccacatgacggggctctgcagtgagaggtgggaggaatgttctgtgtggcctctgatccctcctctttgctgataacatggggagagaatgaagtgcgggtggagcaagcgtatccatttggggcatcactcctgggtaatggtagatcacatttaccctacagaactataagtaaaagttggttactgttaaaatactgagttgcaggaggctttgtttccctaggaaaccttaatattactcagttcttactatcaggacatgattgtttgcaagagtatcaattaggaggctgttccagtaatttagctgagagaggagtacctagaccagggcagtggtaatgtggatgaggagaagtgaccaatttctgatctgtaaatggaaaggaatgcccctcccatatttgtcagaaggattaaatgggaacttgaaagcacctgtaaagtgaaagctgggacacttagctggcatatttcttcttcttcatattgttaatgacagctgtcagcctcagtcatgcaacctcttcatgtaaatgttcagttttaacctactgtcaggttatgtagtacctgacaggagccctgaagatctttttcatcacatgcttattatagttgacatttctgccacaatgatgtgcccggtagaatgaacttgatatggctttattccatacatgtcaagccttggcagtaatgatttattgaaaaggtgaacatttggtaccaagtgttgctagaaaagaataaaacttagtaatgtggtagacagtaagagaagaaattcagtaatgtgtcttacagtctttcataggatacagtgtttcatggggtacacagtcttgaaaattagaaaggtggggataattttatcaagtcaaaacttacactctttgaaacctattaaaccagtgccatttttgtgaaccttgcaggtttttattgattccattcatcataagcaattaactaaggttacttttcggccagcttctaatgaataggctgaagatagaaacattctataggcacaacactcaacgtttctccaaatcccagttcctaggaagtataataagtagagtaatatattctgcttcttaagtttccagatgatggagttttcctgtcttcatatgtcatcacatggatttgttctagttagatgacgatgatgattgtcaagtatatgataatcaattgatgattgctctttaaaagatccaatcttgttttacataggatggaatattgtctttaaaataagtcagtgaagtaccccatcatatataaaataacttgcagtgcttgcttaccaacaattaactttacatcagttaatctattgctctaagcaatgcacaaggtagctctaggaaatacacaattcctcgaaaatatgttttcttgtcttcaatacatttgcactttatgtagggcagtcaaaagtacacaactgaagggatttgaaaaaaagaattagaaaggaaccagtcaacataaaggaagagagtacagactgaatatgcagagtgccaagacagcgcagatagcccccgggccctccaggtctgcaagaatgtagctgtgttagagtcctctgacttaagtttagccactctgtcctgtgattcttcctcatttctattggtttacttatttctctcttcatctgctatacctgtgcgattccagattatcttcatttctttcctcatggagatggcgaccaatctggtagcttgtttacctgtcttcagtctctttcccactccagtccaacttgtctaaaactgcaagaataagcttttttttttttttttttaaatagcattttacccttattcaccagacactgacttaagactcaattaaaaaaattctgctttaagacccacggaacacagtggcagggaatacagagagtctgtgtctaaacccaacaagccttgtaaagaaaacatcaagccctgccaactcacgtagactgtccttcaccttgctctctgtcactacctaggttatttttttggtgaaattgaagttgggccttaccacctagcactcctactcttgcttttcttgtaagtaggcatggcctttcatgactagttccatctcgttttcagtctgtgacactggttggtgtagtaaacacctgtttttagatttgctaaaataggctcctctgttgctgcctgtattagcctcctgggattgtggcaacagcctctcatgtgccccaatgccaggacctgctccttcctgcctactgcagggattgtaaaacagttttccatggtgatctgcaaaatattcatagatttttaatgaacaaaaaaggttctaaaaacaaacaagcatgaaaaatggtgtcttactgcaaagcctctcagagcttttgatatgctaatatgcattgtgacatgctaatgtgaattgggactctccaagaggaagaattaatatgcaacattaatgaaacttatttgatccagaaactacttttttagataaacatctgttaccatcacagagaattacagtgttccaagagagtacagtttgcaaattttggactgctccatcaaataaaattccttccaccttgaccaactcatcttttcttctttgggcatacttggttcagctcagtcatataatttgcaaaattcactatccattttaaagcctcaggtcagcttagtctgtgtacagtcccagcaagaaaagaaaacagtggtttcaggttctagagctgtgtttttatactttatgttcattcagatgaatgtgaaaaccagtttggagaagagtgatattctccaaattggaaattgacctaattgctctttacagagaattatagtttctacttttctgaaaaatataagtacctattctttatctaaaaattattcagggttattgtaaaataatcaattaatacagaaaagtctttatacactttttaaaaaatttgcttctttaaagcaaaagaaccccacaaatcctattgctcaaaagtaacaacgttaacattttgtaagcatccccttagtcatgtttctaggaattttgcctcttggtcatgtacagatggtattataacagagaatagaagtaaggagaacaattaggaaagcattatggtaacctatggaatgataagaccatactttgggatgtaaatagaaaggaggccatgagtataagaggtaattgtatactcaagaggtgcccataaatcattcaccctcacattcagatacatataaaaaagtatacatacaaattaagtaaatttttagacaaaaatatgccattaatcttttcagatctgtgcctagagatccccatcattaccttaatggctgcctggtttacaactgtattaaggtgccaatgtttgtatcacctaatcttcattttgaaacattttactgtttttcttatatagcatataaaatttcagtgaatatttttatgtattatttttataataccatagtatagtctctaagaaatgaaataattgcactaaatggtaaacccatttgaacttttaatctatacttggtagaggcatctcttcttgattaatttctgaggaagtctttatatactatggcttataatatatttttcataaactgccaggtttcaacaattgatgttcccaggttttaatattcttggaagagattaggagataattttcaccttgtgattagccatagccttgtgatttcatccctcttaatggtttgttttttgtcttccatctcttcagactggcatgtcagagtactttaaaagtattctcagtcatatttaaactgggatggtggttcttgtgcacttgctgtttactttgctacacaaggagaatatttaagtttaattccatttgtatctttgatgtaaatatagcatagttatgtgtccagaactatgctgtcaattatagagagatgtaaggacctcattagatttatagaagatatgtcaacacacgttaaagactataaagcaagatgaatgattaatattttaaacagtggtatgttgctaggttctgtagaagaatagaaagaaaaatttcttgacccgggataaccagaagaggtttcatgaagaaaataataggccctgaagagtgtctgggacttaggaaggatggagcaaaacggagggctttcatgggagaaagatgcatcggttgtttattgctgtctaagaaatgactccaaagtgacctaaatccacacccattcatcatttctcatgatcctctgggttgactgagcaattggttcttctgctcatttagcttgggtttcctcaggcagctacatttagctgatgcattagttgggagctaggttcagtggggactacaagaataactagacttcgctattcttgctctcttgttgtccctcagtacaacccagacttcttcagggtgatgatttcaaggcagcatcctaagagagtaaaggcaaaaacttcaagtcttctgaaggtctagctctggaagttgcataatctcatctctgccacatcctattggtcaaaggaatttacaaagctagggaagactcaaggaaatagattccatcttttagtgggagaagcagtaaagtcttaccacgaagggatttgcataccgagagaggaaaaatttgtggtaatgtttttaaacccaccacaagggaactgtatgaacaaagatttagaagcaaaaatgaatttttttgagaatcagccagaagacatattaagacatgatttctcagaagttatgagaagctcctggctattccatagggatcattctcaggaccccaaactatttaggttattggcagtgccggccacttcagtctttgtatctcggatcaatcttactggtattttaataaaatttcagtattattttaagtattatcctaatgcttccatatttaagtaagcataatagtaacactaactttatagataaatagaaaaagtgatgtaagttatattctgtatttgttgcttcttttacatgctggtgcttatgattggagaaatggcttgcaggtatcaccacggaaaagcaaagattcctgggtcatttaaatgtgtttctagtacaaaataaacagagaagagccataaacaaaagaaattcagtttttcatcatagtaagagaggacttgttgtattttcttattccttttttttcttctgtagctgataaagctagacttataaataggtaaggtaatctttgcattttataaattcaaggtcataggaaaatctctgtatcgaaataatggattgctacatagctgaagtcttatcattgtagttttcttattttgtgctttaaagttgttttttaaagatgcaatcaaagaatttacaaatatcctgaaagatacatctcatgctattatcaatcatcagatcagatcataattataccgtgtgtgtgtgtgtgtgtgtgtgtgtgtgtgtgtgtgtaaatggagatggtggggggaaatgtgccttttcctaacttaacataggaaaaaaatagaaacaaaatagaagcgacaaagacatgtgtcatcagctacataatttgtgaaatatgttatactttcagttgttccttgaatctataaaaatagcagttttccagcctgggaaccatagcaagaccctgtctgtacaaaaaaatgagccaggtgtgttggcacatatctgtgatcccagctactctggaagctaaggtgggaggattgcttgagcctgagaggtcaaggctgcagtgagctgtgattacgtcactgcactccagcctgggtgacagagtgagagactctgtctcaaaaaaaaaaaaatcaatttttagagatagaaaataaaagcaaaccaaaatttcagcggcaaaataagtcagtcctactatcttttccaagttggtgttctgctccttgagaacataaagttgtgtgttggtgttgacccttgtccagctttgcatcttttaacacagacctatctgatttctccttagtcatttgtattcagctgaagttttagtctttgtaactatagattttgaaaaatcatgtcacaaaaaaggcttcattttccttctgggaacctctgagtgactgtgcatcatcagcagtctctggctgtgtttcttgtagaacctccctcactttctttcttcctctgcttctttccaagctgggtttaaaatttctgagaaacatggagaagtgacgagtgttccaaggttggcatagatagcattgcactcacttgagattgtggcttagtgcctaagacagctcccctccagagaatcttttagtgactaagttagcctttgtattagatgggcaactgcaccaactaggagggtgtgatgccttaagcaatggggtaggtcctgtgagaagggggcttagagtgatggtagcaagtaagaagttgggaaaagatgggcactaagaggtagctgggggcttctaaagatagcatagagttttactctctggttgtctatggtggcctgacagttgttacatttaggaactattgtttgatccataataaatgagtctgaaatggtgagttcagtattccctgaacatctactattattcctatttcagagggatttttctatattgcccagatagtttttaatcaaagttacaaaaaaatctgtagctgtgtaagcaaggcaagtgtactaattttattagaagctaaatgagttttgctggattagagagaataaagaaaatgaatttacttagtgactgagcagatccaatggtgcttgaggtgtcaatggtagatagggatgctgtttggagcctttggcaggcccccatagatgaatcacagtggaggcctctaggattttggagcaaggccctgccgtcttctgcagataactactctccttttgagagacagctcttagcctgttactgggctttggtggaaactgaacatttgactatgggtaatcaagtcactgtgcaacctaaactgtctatcatgaactgggtgctttctgacctatccagtcataaagtgagtcatgcacagcagcattctatcatcaaatggaagtgatatatatgtgatccgactcaagcaagtcttgaaggcataagtaagttacatgaagaagtgtctcaaatgcccatggtctccattcctgccaccctgccttctcttccccagcctgcaccggtggcctcatggggagttccctatgatcagtttacagaggaagagaagactagggcctgattcacagatggttctgcatggtatgcaggtatcacccgaaagtggacagctgcagcactacagcccctttctaggacctccctgaaggacagcagtgaagggaagtcttcccagtgggcagaacttcaagcaggccacctggttatgcactttgcatggaaggagaaatggccagatgcgcgattatgtactgattcatgggctgtagccagtggtttggctggatggtcagggacttgaaagaagcatgtttggaaaattggtgacaaagaaatttggggaagaggtatgtggatggacttttttgagtggtcaaaaactgtgaagatatttgtagctcatgtgagtgctcaccaacaggtgacctcagcaggagaagactttaataatcaagtggataggatgacttgttgtgtggacaccccttggcctctttccccagccaccccgtcatcgcccatgaacaaagtggccatggtggcagggatggaggttatgcatgggctcagcaacatggacttccactcaccaaggctgatctggctatggccactgctgagcgtccaatttgccagcaacagagaccaacaccgagccctcgatatggcaccattactctgggtaatcagcccgctacctggtggcaggttgattatattggaactcttccatcatggaaagggcagaggtttgtcctcactggaatagacacttactccaggtataggtttgcctatcctgcatgcagtgcttctgccaaaactaccatccatggactcatggaatgccttatcctccatcatggtattccatacagcattgcctctgaccaaggcactcactttacagctaaagaagtgtggcagtgggctcatgttcatggaattcactggtcttaccatgttccccatcgtcctgaggcagctggatgaatagaatggtggaatggtcttttgaagtcagaattacaatgccaattaggtgataatactttgcaggtcttggccagagttctccagaaggccatgtatgctctgaatcagcatccgatatatggtattgtttctcccatagccaagattcatgggtctagtaattaaggggtggaagtggaagtggcaccattcaccatcacccctagggatcaactagcaaaattttcacttcctgttcctgcgatataacattctgctgacctagaggtcttggttccagagggaggagccaggagacacaacaaagattccattaaactggaagttaagattgccacctggacactttgggctcttcctacctttaagtcaacaggctaagaagggagatacagtgttggcttgggtgattgtcccacactttcaagatgaaattagtttactactccctagtggaggtaaggaacagtatgcatggaatacaggagatccattagggcatctcttagtattaccatgccctgtgattaaggtcaatgggaaactacaacaacccaatccaggcaggactacaaatgactcagactcttcaggaatgaaggtttgggtcactccaccaggaaaaaacacgacctgctgaagtgcttgctgaaggcaaaaggactacagaatgggtagtagaaggtagtcatcaataccagctactgccatctgaccagctgcagaaatgagggctgtaattgtcatcagtatttcctccttttgtgaaaaacgtgtttgtgcatgtatatacttgtactaagaaaatatcttcattttatttccttttttttttctttatcatgttgacttcatatcagcatttaagtattgttaactttaatagtatttgggttggggattggtgtgtttctggttgtacaaaggatagttgtattatattaggtgtaattatgactttattattgtctttatttgaagattatgatctcaggagatgtatatgggttcaagttgacaaggagtggacttgtgatgggtaataatgagtgtcaccttgattagattgaaggatgcaaagtattgatcctgggtatgtctgtgagggtgttgccaaaggagtttaacatttgagtcagtggactgggaagggtagacccacccataatctgggtgggcaccatctaatcagctgccagtgcagctagaatataaaacaggcagaaaaacataaaaagattagactggcctagcctcccagcctgcatctttctcccatgatggatgcttcctgccattgaacatcagactccaagttcttcagttttgggactcgggttggctcttcttgctcctcagtttgcagatggcctattgtgggaccttacgatcatgtgagttaacacttaataaacttccctttatatattaagattaatattaagtgaagatatatcctattagttctgtccctctaaagaacactgactaatacacttagcttaaaagagaataactatcatagaaggataaagtggagatcaagccatctgaatactttgattctttgtttttactgttatgttaatttcttataattttttcaagtaaacaatcttcccacatctttcccttcattcctcttcctctctccatttcttccgtctttgttacattagtaattgattaatgcaggtttgtgattaactttctaaagttaagtggttctttagggcatataggaaataatatcaatagtcgttgccatgtaattattggggctattttgacaaagtcagttatggtaatcacaggatcagctctaagataggtgacatctatccaatattatactaaaatttggtaagttccaaaagtgatcctgctgtgtcctaactaattctactagttgacagttcattcaaatagtgattcagtcaactcactgtatcacttggaatttccctttccaaattccagcatctcttagagggaaaatgcgtcaaatagttttcagtatttaacacttaaagttattgatgagaccagtttctaacaaaacagttggcacagcccagatactagatggaatggggtgtagattaagtgaagattggaaaatagaaattgcctggctcgtagcagatgcatagagggtgcctacatatatgggtcactgcaaaagagcatccagcgaagccaggagccattatgagagagatggaaggagagcaacttggaaactggaagtttctgaagatgagcttctccactttgtgctaaggccaaccggagccatttcaaatgttttaacaagctgtgtgctacacagatgatcacagattgctggaacattttccttccacatcataaatgtcattattaaaggtgaactttaatgaatagaaataaaagtagaaaatgatggttggatcacctatgaggccttaagcgttactgccaatgcattatcatatcaatagtttaaactgcttagcctaaggccaatatcacttggcaagatttataaaaggaagataattaggaaaagttagtactggttatcattatggaggggcacaaaatataatatctaagaaggaaaaattactaataaggagatggagagatgcagcttgacctaatgagcaaacgaaataactggaccacatttttttagagacctgaatatcactatttgatctcttatcatgagcaatttataagagtgaaggccaggttacagttaattagcttaacatgatttttctttgactctacaaattgtttaaccccgagaaataaactatattgtttatatgcttagattggctatatgaatttttataaactataaaaagagaaagattcatcttctttcaaagaatataatttgggagaattaaggatgaatagttttctatagggaggagtggatactactggagggtggggattatgtctgtcttttttatcattgtgttcccagaggttggtatagtggctggcatataataggtgtcaaataaatatctactaaattcagcaatgcttgaatgaatagtgatgtctgtgatgagttataacattgttcaatcttctgacctgtctctttttgataacattgtgtattctttcatgtctttaatgttcatattataaaaaggcatttttccattttaaaatataaaactatattacatattaaaaattgttcttcagagtattctcttgggctgtgatgtgtgtcataaaggactcactaccctcttcctccaggacctctgcccaattgagaaccactctgtgttattaacgttaaattgatcatagttacataactaatcacatttagtggcttaagaaaagaataattatttattttattcatgaatctacaatttgcacagggctatgagggtatgacttatttcaagttcatgtggtatcagctaggatggcttcagtggtcctgaaaactacttagttgactcagccacatggctggtaggctgatgttctcaagctgtatcctgcacatacaatcacagactgatggaacattttgttttatttcttaagtatcattattaaatatcatgaatatgaaaagaaaaaacggaatggtcgaaccacctacatagtcgtaagtgttaaccagaaatgtatactcacatcaatattgtaaattgctcagctatggccagtgcttagctgggagttcagccaaagctattggccaggggcctttattcttctctatgtgggcctctccagaaaaatgctcgggcttcctcacagcatgaaaactagattccaagagcaggtgtttcaatagtgaggaattagaagtttctagttttgtaaggcctctgggcctagacattggcacaaaatcatggtcacaatattctagtggtcaaagagtcatagggtatgcctacattcaagggatcagaatatagaccttgcctctcaatggaagagttctcaaagaatttctgaccccttccattgagaggcaaggtctatattccatcttttgtgtgtcataattatcttcaaaataatccttttgtggtgaataagaaaaatataagactttctatgtaaggcatttgctggtatgtatgccagatttactaagaccttaagtatgattagcttgcacaattagcagttatctgaagtctgtaagtctgcaggagagcatataaaaagacccttatgaaattgtcataaattaacctaattattactattaacagtaaagtacatggattgactatatgataccttcatttaaaaggtaaaataatgtaaggggtctctataaaactgacaaaactggccagaccatgggaattcatgttcaatgaatgacaatggaacttccaatttatttttaccttaatatggttaggacatgaataaccttagcctttaaatgtttcactcccctacctgccttaacagtgtatattccttctgtatatttataacactggtagtaagattttgatatgaaaataaaatgtttctgaaaaactgttttttagtttttggtgtgtgaatttacaggaaaaaaatatttgaacacttgccatgttctaggaactggtctatattgggaaaatacagcagtgagccaaaaggaccaggcccacacctgccctcttggaatttgcattcctaggggaaaagatggataataaatgaataaataaataaataaataagtaatgtaagttaaagtagtgataaattatgataaagcatagtaaggaggtggatagtgatagtgagggaagaggatgtttagacagcatggtcagggaaggcctcagtgatgaatgagggttgttttttttgttttttttgttttttttttttttgacagagtctcgctctgtcgcccaggctggagtgcagtggtgctatctcggctcactgcaacctccgcctcccgggttcaagcgattctcctgcctcagccccataagtagctgggatatcaggtgtgcaccaccatgcccagctaatttttgtatttttagtagagatggggtttcaccatgttggtgaggctggtattgaactcctgaccttgtgatcgcctgccttggcctcccaaaatgctgagattacaggcatgagccactgcacccagccgatgagtcaggttttgagcagagacctgaatgaggagcggaaacagaccaagtgaggatcatggagaagagtgttcaaggaacagctagtaaaggggctctgaagaatgagttagtttaggttgtttgatcagcatcaagaagatgtatactgaagcagagggaatgaagagaagactgataggagtgatggctagtggaagaggcagtgctatgattatatgtggccaagattatatatatatatgatatatatatatatatatatatatgattattctttttgtttgggaaatgattttgtggtgataatgatgcatagcatttctggatacctagtcgctactagactctttttttatacttttttatatgcgttatctcatttagcgcaacccttttgtgaagattccagtgtaattttaaagttctaagtgaggacatagaggccaacggaggtttagtaattggtccaaagacacgcactcttagagactgcaaggatgctggtagaggtagtgagaagtgattgaattgaagctatacgttgaaggtaaagccaacaggaattgttgatggatcagatataggagatgaatcaaagaatggatttaagaataactttgaggtttttgatctgagcaactaggtatggctttgctgtttgcagaggtgaaaagtgcatttggctgttggagagagggtgctatagactgagtttcttttcggatgtgttagatccaaataatgattagacatccaagaagataggtatgtctgtaatatgggagggaggtattattttgagagttagcagtttagagggagcttctactgagatcagtttccctcattattgtgtgtcatgctccaaggcctctctcattaaagatgtgcccatttgttcaggcagtgctgttgttgcttgctggagtatcatacatgctgtcacattatctcttttgaaatgtattccagactcaagattgaagatattcataaggaagaagtgatttctctttttaaaaatatatgtaaatgacatgaatctatatatgtgataaaattttataaaactatacaccgaagaaacaagtgcatacgaaaaaaagaaaaactggccaaaaaaaaaaagctctctagtttggttaattgtactgtgccattatcagtttcctggttttgatatattactataattgtgtaggatgtcatccttgcgagaagctgcatgtgggcaatgcaagctttctgcagtatttctgcaacttcttttgagtctaaaattatttcaaaataaaattacaaaaatgtaaacatacaattgaatctctgactttaaattattatcttgtttagtcttatctgatgtagggaccctacattcacatgaaaatgagaagcagtgagggataaagagcagttggttaatgggtacaaaaatacaagtaagatccaggttcagtagcacaatagggcaactatgggtaataataattgattgtaaattgcctgagaactggaagagtggaactggaatgttcctaacacaaagaaatgataaccaattaccctgatttgatcattatacattatatgcttatatcaagatatcattgtacctcataaatatgtataagtattatgtgttcataaaataatgaaagtgaaaaatgaacaaaatggatatttttataataggccaaacttaatgggatgttgataattcttcacttattagtgctgcagacttttaatacattagcaggttcttcatattttatcttaaacttttatatgagcagaatatattttgtgtgtacatttaatgtaccctaaaagatgaaatgtgtcgtaatttgttaaactagaaggcagtaataagacatttggcaaatgtagcatatcgcaagcatcttagagagccaaacaagttaaacatgtcaaaataatagatagttctgtgacatttattgacaatttatgatagctgagcactactaaaaatcgtaattgcagcattatttcattaacccctaaatactcattattttaaaaatttaaaattttcttatttctcttttctgaaaatgtaaaattccatatttgttagatgattctgctatcattaatttgttaaccttatttctgtttgtttttcttaatagcaacaatggtggaatagagatgttaagtctgtgattacctttagtttttttttttttttttttaggaaagacctctatatcttttaataaacttcataattctttatagaatcaagatctcaggatactataaccagaatcctagtaacctcttcatttcaacatggaaaactgatacattaaagataaacacatttattttgaactattaaaataaatatatgcacacaggacgttgaaagactgacaaaatgataatttttttgtttttaaatatgaatattgaaaggtataaagactcacttgggaaatgtcaacactgtattcctcctacacaggtctaacaaaatctgtcttaaaaatctgtcttaaaaaattgtcctgcactggcatcaaataatagcagaaaaactgactacatttttttaaaataatagctttctgttgtgaaattgtaatttgttatactcagaggagaacagctcttcttgaagaaaacaaataattttctaaaagcagtatattaaagatcttaagttgcttcactagcttgattttataccacttccatcaaatgggatttggctgatgaaactgcaaagtgaaacagcctatattttgtttacagtcatttttcaaatgcttggaggatgtaggatggaaattatcgttgcctgtgagtctacttacttgtgaaatgcttatgaaatgcctgtgtactgaacattaaggtgaataaagtactgcccccttttcaaaaaagattccagttaacaagagagtgaaaccagaggggcagggaagttgcgggtagtgtgctattgaagattggaagtttgttcagtttaggctgaactgtaccctaaataagcttttgtaggatcctgtcagcattaatagcctgactaggtctggagaaagaagagttggtgaattatggattgaggaggagggagcagttggggctttgaaataccctataccacctgtagtcccctgtagatgaatgacaattgtcagtgggctaactttacatttaattaaaatgatggaataaaaaaaatcactggaataattacatgaatttaataactggaatttctcggcattgccaaagttttattttggctaaaaactccaaacctctttatcttcagaaccttctaaacatgaagcacattaatttgtctccactccctaaatttctgatgttctgtcaaaaatatttataaccagggaggtattccaaaaattggaaggagcaggcagtgagaaagagcatatgtttctaaactggatcatcaatccctgaagaatttaaattgattaggcttcattcaggaggacaaagtggaggataactttaatctactaacaaatagaatttcttaggctaaattataactttggatcatctgattcttcagaaaattataactttggatcatctgattcttcagaaaagatgactcttacattttgtcatgttgactagagctctgcatgctcataaagtcatgtttctcctactgcaggtaatgttttctgagtgaataccaggtgtcaggcagtcttctcagagttcaacatgtatttacccctgcaagtttataaggatgtctctgtcaaattattcattgatttagcaaatatttgtatttttttcacatgagatatttgttttatttttatcatttcttctctttcagctcttctttatgcaactatttttggaaatgttacaacaattttccagcaaatgtatgccaacaccaaccgataccatgagatgctgaataatgtacgggacttcctaaaactctatcaggtcccaaaaggccttagtgagcgagtcatggattatattgtctcaacatggtccatgtcaaaaggcattgatacagaaaaggtatgggttattattgttattatttagtttctattttagtaggatcttcagatgcattaagcttttccagtcacgtattgcttgtataattgcttcgtaactgttattctgtatttgtaagtgacatatcagtcaatcagtcatatttattaagtgcttagaaggtgcaaagcactgaaccattaatcatcaattattaccagtcatcacattcaatttagaaaattcagttcgtgaaaataactcattattctatttccccaaaacagtcttattacctctcacagtaatttgttgcattcctctaaaactcagagtgctgccatttttcctgctagaatttattcttgattttccctttgccttttttgctcatttaaaaattagaaagagacttcctgcctataaatttaaaatgtatgtgtcttctatgctgtcctccacctaaatttctcctgtctcatatgttttataaagaacttataagtctttattttccactttaccttacacacatctataaaatagatatctccctctccaatcatctggtatctctaatctcttccttgccttttcatggagctgattttaatttttctcatgtatctcatatttggggcaaagaagaactcaagatcctccttaaaataaataaaaccaaattttaaaaaatcctcacttcctacacccagctgattcacatcaaatacagaagatgaaaaataaagcttgtacacagagttttagaggaaaccagtcttgagctattttactttataaacatcattggagactattctttttaggtactgatttttgacacgtgataattagatggcataatactttcctggccatttcccacaatttttttttttgttcttttaaccttgtgaggttgacttacggtttttctttaagacctgctcaaaaagcatctttcaatgtcaaagggaaaaagcaaatgagcaaagtagatgtttagttaggagaatttcatgaagcaacatgtaagtaagttgttttaagccagggcaggtgttgttaggaataggttgagtggaggcatagggaatggacgaggaacttaggagttgagggagagaagccttcagagggagtgcaggtgagatacttgggggcagctatgtggaggaattgtgaaagggggtgagatttactcccttttcaatattttacaagatacagtataaattttccagttaaatggccccttgaagtagtacgcatgaaaacagaagggagaaagcaagctacatttctatggaatttcattaatgtatatctgagccaatatatggttagtagagagagtatccaaagaagaaacagaatcttccttggagtgaaggtgagagtaacagaatttaagtcatcaaaagcagggtgtctgttgaagtccacattaaatgaaacagatcaagaggcaaccaccggcctcgtcaatcactatctcagcaagaagctttcctttccagaaaatgcaatagagccacatggtaactaataaaaatcagtaaatgatggaataatggccttttacgtatttgaaaagagtctgagccagggcctctggcacaaatctagtacagggcagagttttgagtccttgctctctatattcttgaatactgagttattcatgaatggagccgagtagattgtcttcaagcctccccttgaggacatgcttaactgtctgattcaagatggagttagggtctgatgcactggcatgcagtgtgtctcaaagtgcgcatgccatgtggcagggaaaaatttctgggtacctaccatggactgccttaaataatattttgtttccttgttcatttgcagttaaagaaaggtacttctgattagcaaagtagccaaggaaaatggagtaatagaacgaatatggggagactaatattaaaagtgaaataaaaatttaatttcaatgaaaagattttttaaggggatattttaagatatcaaaattgattagcatttggataagaaaaaatcatggatgtagcttttaattgagtgaggaatccttaaagttgtttttgactaataggagaagcatatttaaataactgtgacaaatataaaagtttccttgttcatatatgaaacatactctatgcctgtattgatttatcccagtctattaagaaaatccctacccagatgcataagttctaggttaacagcactgaaggaaagagaaggaaggaaagacatctgccaaattctgggcttagaaagggggtgtagggatttctagtattgcatcatcaaagagactgaatttaaaaatgattcttagattacacaccatatgctatactaaacaagaggaaaacaaaaactgtcattcagctctctggttttgtaaagaacctgacaactagagcagaagactcctatgcctgttaggcattcagctatttaacaaataaattatatatataatatatatatataaaaaatatataaaaatatttaattttaaaatacaataataaagatacaatacagggccgggcgcggtggctcacgcctgtaatcccagcactttgggaggccgaggtgggcggatcacgaggtcaggagattgagaccatcctggctaacactgtgaaactctgtctctactaaaaataaaaaaaattagccgggcgtgctggcgggcgcctgtagtcccagctactcgagaggctgaggcaggagaatggtgtgaacccgggaggcggagcttgcagtgagctgagatggcaccactgcactccagcctgggccgcagagccagactctgtctccaaaaaaaaaaaaaaaaaaaaaaaaaaaagatacaatacaataatacaatacaataataaataaagacttgaagcatagacaaaagaattagtaattaaagaaaagagagggaatagatatctcagaactagattccactataaataaggactgaatataagttaaagaatgaattgtaaagatggaattgacatactacttaatatcattataaaatgaactaaaaatctaagaaaatatttataagggtcttcactcatgacctaacataaatatcagaaaaactgagaattaaatgcaaaaaaacaagaaactgtaaactattagaagaaaatatgtgaatatatttaatttatctttgtacatattaaagtaatggaatatataacaaggtaactgacaaatagattttgctaaaaagtgtaaaatctttcacactagaaaactatgaaaatgaaaatgacataaagcatttgcaacaaattttgcaagtgaaaggttaattaccttaatatgtaaagtgatttattaattaataagaagaattagaatacttggggagaaaaacgatctgaggacataagtaatttatggaagacagaatgcaaattactaataagcataaaaaaggcttattttcccttggaacaaagagttaaaacttaaaaaaacaaacaaacaaaaagacatagaaacatttttaatatggtaaatggtcaaagatgatgcccaatcttagcaaaggttggtgactggcattattgtatgattctgggaggtgtgtaaattggtagcacatttcttgaaagcaatttgaataagataatattttaaatttggtggtattttagagttcagtccttgtgcctcgtcccttttctgtctgtattccattctttcatgatatcctgcagtctcattactttaaaccaacaccacccagtgttcatacttctcttgaacttgattccctgaactatagactctcccctccaactgcctactcatgtccagtgaagttgtccaaaaccaaacttccaatcatctcctaaaaacctgttttacacacatttttttcccattgaaattaacggaaacactacctttcagttgcttaagacaaaatctcccacatttaaacctctgctgaatccttttggctctacctccgattctcaccaccttcattcaccttctatcacctggtccacatcaccatcatgtcttccctggatttttctaataccaactaactggccggtgcttccacctttgtcccctgtatagtctgttctcaaaagagcagcgagtgagcacatatggcttttgtaacaaaactttctatgtatgtgtgtgtgtatctacctatctatttatgtttatatcaatcatcaattatctatctatgccatagacttttgattatgagttaaattgattaaacctgttaaaatacaagtgtaggaaaaataaaatgaaaggttgatgacagtaataatataaattccttaattgcagtcaccatcttagaattatgtatgtacttttggatgtagctttaataaacggtatctgaattttaacaatcacccagtatttaatgttcgagacctctgttagacttcctgttcctccataagccaaatacattttattactttatgtttcttattttatattttattgataatttttttcaaatattttaaatagaggttatcaaatttaactatgaatatatactttaaaaggaaatataatatatgaagccaaatgtctttgttttaatgcttctcttctctggttagttttaaaatagctgtatattttttcaattgcttgtacaaagaaatttaatgattcattgaagctaattagagaaaaaaccttcgccccaatgactgagatttccttctatcatttccacatatttagttttatagatttttgaattcagctttaacccacaagcaaattaatcactgtgatttaattctgtcttaatgtgacttatgtgaataatgctttctctaatataattgtggcattaaaatctgtactgatgtggagattgcagcatttctatcatgaaagtttgctttaggcaatattttttaatatagaacagtgcctagttcaattttatttagttgaaaatatgttattgactgctcattagtacggttgctttagattttttttaaatttaatagccaaatccatcatctgggctttgctgcttgctaatattctgtgtacatgaaggaagaagaaatgggtggaataagtgaggatttaaaaggggaagaggagattatgggaaaaaatagaaaggatgatggttgaagctcaacaaattcgaccccacagtttgaaatgactttgctgggaaataattcaaatgaagtaaatggctggggactttattttcagctttttggaacatgtgaaaaaatgtaagacctgtaaaacaatgtgtagaccacatatttcccatcatactggatttttttcagcttgttgcatacaatgaaaggtctaaaaccttaccttttgtattttccaatatcttacttttttctctaacatgtagcttgaaaaaaatcagaaaaagctctttagtcttcatttttgtttcatatgttttataataaacataaggtatcagtaggaagatgctattatatgaaatgtcccagcagaattacacaaaaaaatcaggtaggagtatgcctttagaatttaaacaaattgaaattttgaacgttttaaaattttttattatcttttaaccgaatctatcagagaagcactctgctttcaaatacagtaggcaatatatatattttttacaagttaatttccttttgacagtttaattttgtatatttttttaatttgggaaatgatgtttaaatatttcatcgtattactagatatgaaaaatggattatattttcatacatgtcatcattttcttggttcgatattaaaatacttcaagaggttcccgtgatggtatatatcatagttgaagccaagaccaaaggcactagtcttgtaagaaaactccaccgacaaatgtgctgtatttaaaagccatgtaggggccgggctcagtggctcacgcctgtaatcccagcactttgggaggctgaggcaggcggatcacgaggtgaggagatcgagaccatcctggccaacatggtgaaatcccgtctctactaaaaatacaaaaattagctgggcgtggtggtgcacgcctgtagtcccagctactcaggaggctgaggcaggagaattgcttgaacccgggaggaggaggctgcagtgagctgagatcaccccactgtactccagcctgggcaacagagtgagatactgtcaaaaaaaaaaaaaaaaaaaaagccatgtaaatatatccatgtgaatataataaaataaagctgaattggtcttaagatgcactaaaagtaatctagcctttgaatcaagaaagataatgatcatgccagtacagcccattttaatcagatcatagattgtgtttggatattgtgttcaacttctgctggatattttaaaagaaatgtcatcctataaagcagcacacttaccaggagataagcatgatggcacaaagttcttggaattttgttatatgatgggtagttaaaataaatatgaatatttagtttagctgagagaagacttgggagagatatgacaggtaagttgaagtatttggcatttttaaaaatggaatgatctgtttcaggaggaaattcacagtctgccagtaaaagatttaggcacatatgtagaacatagtactaaatgaacttgcaggtcctgacagtaagattatatgattgtgtctgaatgatttggagtactattatatattacatctcatttacaatttacatatatgtatttaagggattttatataaaaagaattatagtataaaaatctgtaataattcactaattattttccaacaactttttattaggacagctaagtactgtagttttacatatgacatgaaagggcttttccaaggtgatagaacatatactaccttaaaaaattaggattcagaatgtctaatagaggggctatgccaggccagtatgggacaactgtagtagttttccctgtggtctttgagttacctgcttgttgagcaagagacgctattaagaaactattataagaaaccagcatatcattgcaagaaactattcttcagcttattatttgaaagcattatgcaacaaatatatgaaaactataatttttccatcagtacctaaacgtaatcagagaacttaactattgttacatctacatgtgtttctcagttgttacctactgaaatattacaaagtaagcattcagaattattattgacatttttcttttctgactgacctacacattttatgtgagaaagtagactttatttgaaacctcagttttttcgtttcacgtatcacaagttaagtaaaataacagccagtggcttattgaaaacattacaagcagatgaaaactttaagcaatactttttataatagtaatttcgaacactcaaacatatatattagttttcatggcttttagcgtagtttaagagggttccattgcaagctttacattattgtcagctaatataattattagtaaacttttcatgtgtcaaatcttaggctgtgttatttgattcaaacctatctttggggataatattaagcacattcttttcttgtatcacgttgaaatttagcgtaatagtgtgggctaatttatatttcattttctcatcactctgatactagcttctgaggaaggaccaaaggaatcgtttgatagccacagtccagaaatgagaaggtaggattgtttacagaggtccatggataacttgctcagtaccctacttcatctagaccataagcatcaggttccacgcttttgtgttcacatctgtattggagttaccaccagccacatttacttagttggctgggaggtgaaaaatgcccacatggtgcttgcgcaaggtaggcaataataagaggtagcagataatttagtctattgcggttataatacatttcatcctttacaggttataaactacaggcactgtgttatgcctggcaccattttaaatcttagtttttgcttggtattcagtgggcactgttttatttaagcatagatgaaaatagaacatcaattgtggagtaatttggatgaatgacatatttctatatatatacacattgtacagaaatatacgttagactttggggaaaaattaaaccatgaatacttccacatgctgcagacagtgttatagtatgagtaggtgtttgtatccaacctattattgtattctgagctgccttgattgatctgttttcaaacttccactgccgtaaatctgcagtaatggctattgatacacttatttttaaatgagaccataatgcttccgagactttttcagtttttaaggtaaaagtagaattatgcagatttgaattttataaactaaacttttaagaaacagtgtttcaatttctttgatttctgttgttattattatttgactgcgtttgttatttttcatttctcatccagtgctttttgtagctttctcctctccactcactctcccatctctttcttgatttttttttaatggtaatgactaaaagatgcctgtcttttggctcaggctgattgcttttgattttgtattcatttatataatttatattcagtactgaaaatccacttttagttcctttactagtagtgccaaataaccatgggcatcattgtctggcacagcagaaggcagcaacaggttgtagaaaaatatagtgaatagattgaaataaaaggaaaaattgttatgtaagaaagagattctgcagggtgtggcagctcatgcctgtaatcctagcacctggggaggtcaacgtgagtggatcatgaggtcaggagcgagaccatcctggacaacatggtgaaaccctgtctctactaaaaatacaaaaattagctggatgtggtggcgcgtacttgtaatccagctacttcggaggctgagacaggagaatcacttgaacccaggaggcagagtttgcagtgagccaaaattgtgccactgcactccagcctggctacagagcaagactccgtctcaaaaaaaaaaaaaaaaaaaaaaagaaaaaaaagaaaaaagaaaaacaaaacaaaacaaaacaaaaaacagaaaagaaaaagaaaaaagaaagagatgcatctggttcattgccagctgcctggggtgctgctccatgtcccctcctgggcatgggtctggagtcaaggagagggctgcatggctatgcaacctgttggcttcctctcagctttgctttttatggttcttgacttctttcttaagaccttcaggaggcattttcttcttttctcataatagcaaccttccttatttctctataccttatacttccttgaggaagtctttatgtccctagtttatactgggacatctctgagagatggcatatataaatttaagaaagatctatataatgggagaatttaaaaatatggacatagccatttttaaaatttgcattcatatggaaggaaactatggtattagagggttttgtggtccttgctatagagtgataaatagaaataaacataatccctgctcttatgttgttcagagtctgatgggggagaaaaatcttcaatagttaccctgataaacatatgattttatattgtgatgatgcttgaaatacaatacaggaagccatgtcagattttaaaaaaggagagactgcatttaagttgtgaagatgagagtcaaggaaagtaatagaaaaaaacaatagaatttggacgtgaaagattgttagaagctgaaacttttcacctattttataataaaattcaaattacctgtgtgctaacagtcaaataactggtctgaaggtggaaaacaaatgtaaggagggaattcaaatacctagttaatctattaactactaataactcattaaataaattaataatattaaatggtctgtgtgttccatgtaaataatagaatgatttccactgaatagtcatgatggtttaaaatattactctaataccaataacaacacgtaaattgatccaggaacatattggtacccaaatatgattgaactaatcatcacatatttgtttagaataatgctaaataaatatgtgggtctgctgcctttgagggcattatccacagacttaacccatatgtattgtgacagcacagatggcacaggggagtctgcagggcaaatatcagaatatattcagatcagggtatagctttactcccactactacttctctcaaggataaataaatgttagaatatattatttattatgaataagtgttaatatttatataaccattttgttttcaaaagtgcttgtttagttgaatacatgactgttacataaaattagaaaaaagagctagaaaaagaaaatatgatgtcactcataatgctacgacttacagaagtatattgtgccacatttatctgtatgattttgtaaacatcaatttatgttataagtatacaatataataacatttgtagtctattctatgtctgtattacatcatccacatattattgaatatttaagatgtctaatgagtacattaagataaacactgagaataaggggtgccaagtccaaggttatgtacatttttttgtttttattatttttgtagcttatttcttctaaagtatcaaatgagctacaaccaacattaatttacatatgtcttttttcagaataacattgtcagtactaggtattaattttcttttaatctttgtgaattcagaaggccaataatcttagcatgtttaatgtttactctttccaacacatgtatactataattattcccatttactgatacagacactgggctgtaagaggttaaatgacgtggcttagatcacacacagggaaacttggattttgtactatgtctgcactgtaaaggcaatgttcttagtcactctgctgcttgttgaatatcagtatctggtagacaagtgtctccttatcacaccttaattatggctcttttcaatgtgtttattcttctaaataaactttccttatccttcccactcatcttcatactacgcaccccagataaatcccattagcttttgactgaaattgtattgtcctaatctcagagttcaaccattcagcagagaccatctgaaaacaagttcaggttgcttagatggggcatgatgggcttatgagaaacaattagagaccttggacctagattatctaatgcagggttagagattccactcctagaaaccagcatgaaaaccaaaggattccacagtgtgagtatgaatcagaggtagtgcagttggaatatgatgaataaaatactgcaccagcagtagggagtctcctgttctagttaacatgtcttctaggctagttcctgtattccggctggatgaccaatcagacttagtctcagaatatatatgcttgatgatcttttccaagatttttaaggttgaaaattaaatgcatgtttcgaaagagttagtgagaaatattagtgatttttggtgccaaggaagaagtcagaagacataatttaaatcagtagtttaatattgtaacccttgtatcaaacttcatcttgataataaatgagaagttaatgggaagcagcctgcctagggaaaaccagtcactgttaaatgagaaacaacccagcccaactcccagtgttacatccacctgtttcaattaagatccctcttgtctaataacacaatttgaaatgtcagtacatccgtagagacttcacttgtttaatctggtagttattatttggtttcagagtgcctggtaaagtagtaaaatcaactgtcacataattttacaatgtttttactgattcatataatttgataaatcatagaagacagtatgatcagaagtagttcatttattcagccattctcaatacacttgagtgctgtccttccatataacagggaagcaaacaaaactccaaacctcaaacttcaaatcatttttactattaaggattaatgcttcatcatcatttaagttttctgttagagaaattttgatttaatgatggcttatttactatgtaataaaatattttatgcttagaggaaaacatggaaaattgtaaaaggaggtaaaattcttttatgctgaaagctgaggcctgaccggaagtttaaccaagaattcacaaatatttaggtagatattgatgtatgtgttgatatttacttgaaagatatacttccccatttcagtatttaatagtaaatgtccattaagcccctgcttacattcaagacattgttccagtctctggaatgacagtggtggatatgaggcagttcctgccacgcaggactcacagtctagtaggactgaacaagtacatttttactttctttgacctcctggcactattttgtggttacacaaagagacacttggccttcaggtgtgggccacctggaagagtgcagaccaagagtcagagggtaagggaacacacatttagggactgtgcccatctctaagcacttcttagtgttatatattcctgagttcctgtaatgatcacaaacatcctatgtggcaggcgttatagtctccatttaaacaataaggagattctgaaaaataaataaattatccaagattatacacctaataaacggtagagtcaaagtttgattctgatttttaggattctgacttcaaactttatgccctctgccctaaatcactcacctactccatgccccgtatgttccaggcagtacatcaggcactggagatgcacctgtgaccaagataggcatggtccttgccctcatgaaacttacaatctagtagaggagacagataaaaataattgcataaataattaatattttttcaattccctaataaaaattaaaatgcttatgcagttgttagtattttaggtgaaagaggagattcttttatccttttaactttggttttctttcttaacatagagaaggatggctcttgcctgcattgagaatagtgagtaaatacactatccctaaacatactgtgctttgggatatattgaaatctctgaatccttatgaatatgttataattagagtgatctttactactttgcaagtactctgaagccaaataatagctatgattgtaatttttgtttttgtttttattaattggtaagggatatgtaattttactgaactgaattggtatagtgacaaccaggaacaatgaaacttggaattttagtgagcttatgttgcctgacttgggatgaatatcagattaatactaggcttttctaatatttaaaaaatgttattgtacttttctggtattggtcttaggaaaacctgctttcatttgtacaggtacatttcaaaaatatatacaaattttattttctgaaattccttaagcatataagttcccttaaaaacttatcactttaatgaatagattgcagagaatcatgggatcttagtcaagccaagaaccacacagtactcctgtaagaaagcaccaagtgaatatattaataataggcctggtgtcaagcttgttatttacatagaacacatatatacaataaaaagacctgttctgtaatctaaattcggcagaattctagaatattcctgatattaaatttatctttttaaaaaaattcttgtaatgaaatcatcctacaaatgtacagaggaagaatttcatttatttcgttttttttgagggcaatcataaaaaattgaaacgtagcaaaagtaaaacaaaaaaaaccaaaacaagcaagcaagcaaacaaaaaccccttcagtctaatttttgtttcttgtaactttattttttaaggtattttataggagatcagaagagctggcagagaaacccacatcttaatgttatgacctttacttactaaataaaaaaaatgtgaatgttagtgtcaaggcatcagttatgccgtcaatatttgaagtaaagtttcaaattgactaaagcttacacttccatctacaacttttaaagaatctttttaaaaggctatgatattacatattttttcttaaagtattcctaagaatattatgtattacattaattgggtaatattttcatcatggaggagcaatgaatttcctcatgaacttagatgtgtacttgtttaatctcataattttttatcctataagagacaaaagcagttgggtcattacaattttaagaatgacctcttaaaataatacaccaaatataactcttccttatgtttgtatttgtaatgactttcacacaaaattataggcttctcataaaatgaaaatcaatgtaaaaagaagacagtaaaacccatgtacatcaacatttacacatacacatgttggtaaatggttaaacacaatagaggtgtccagccacctggaatgtcgttgttactgagcttggttgtattgagctttcgagtcttttggaagctgaattaaaaagtgaaattctttagtctactgaaagaaataaacacatttgtctaaagatttgtttattttcttattatattgaattcaaaaagacctttatcatgtgaagctttttgtttgcaagcagtagagtatattcgttaagatgagggatcagaaaattttttctctaaagggccggatagtaaacagtttagcttttatgggttatatggtctttgcctccactactcaactttgccatagaagcatgaaaggagccatagacagtatgtaaataattgaacattgttgtgtcccagtaaaacattatttgtggacgtattaatttgaattccattttttctcacataccattaaatgttattttttcttttgatttttgataactatttaaaaacatagaaaccattatatactcagtggctgtacaaataccgatgatgagtccaatttggccttcagagtttgctgacctccacttaagactttttagatctctagtccaattgtcagatttctatcctatttaaaaattacagtatcatcatctcaaaactcttatgtaccttgcctgccttggttttcttcatgaggctcatcaaaatctgaagtatgatacagaagttcacttatatattctttgttaattgtccctctagtacaataaatagtccatgggggcagggagttttgtatcttttgttcactgctgaataattattgcctagattagtgtttggtaagtgggatgtgttcaataaatatttattatatccgtgaatgtaattctggagttcagaaagacacataaatttggagccattaataaggccatgaataggtagttatgatcactcaaaatgacattctagctaggaaaaggaaaagagcttaagatcgagctttgaggtacttgtacacttagatgttaagtagatgagaaaaggccagaaaggatactcaggagtggctggtgatattagatgaaaagctgaattgtttgattttataaaagccacgagagaaaatgaaaaactgccttgcagtcttctaaaagataaataaagtaaaacgtaaaaaagttccatttggattttacaacatggagattactggtggatttgatacaggcagatttgttagagtagtagagacagatgcaacactggagtgaggtaaggagtaatgtaaggtaattaagacagtgggacttggtcaaagggaccatcaaactgacatatgataatggcacaagataatgattctaaaaataacctcatacatacgtggagattttatatatgataaagacaggcaaatttagatctgtggggaaagaaggaaacatttaatgaatgttattaggattaatatttacctgtatgggcaaaaattagtttgatctctcctttacaccacatcaatcaattctgaactttaagaattaactatttaaaaagtggcattttaaaataagagtagaaaaaacgatggaaccccaaaggactccaaataaccaaagcaatcttgagaaagaaaaacaaagctaaaggcattacacttactgatttcaaaatattttacaaactagaataattaaaacagtatggtcctggcatacagacagatgtatggaacagaatagaaagaccataaataaacccatgcacatacggtcaactaatcgttgacaaaagcttcagtagtacatagtggggaaaggatagcctcttaaataaatggtattgggaaagctggatatccatattcaaaataatgaacttaaacccctatattatacataaaaatcaacacaaaatggattaaagacttaaacataagacctgaaactaaaactactagaagaaaacatatgagaaaatcttctttacattggttttgacaatgattcttgaatgtgacactaaaagcaaaatcaacaaaaccaaaactagatagtgaggggaccaaaaaaaacagagaatagtgggactacatcaaactaaaaaacttctgtaggaccaacgaaacaattaacagaatgaaaaagcaacctatataataagaaaaaatatgtataaactataaatcagatatggggttaatacccaaaattgataagaaactctatcaattcaatagcaaaaacccacaaataaccaaatttaaaaatgggcaaaggacttaaataaacatttctcctaagaaaacatacaaatggctgacaggtacatcaagtatatgcaaaggtgcccaacatcactaatcatcagggaaatttaaaccaaaaccacagtgagatattacctgtcaactgccaggatggctattaccaaaaaatgaaaatataacaagtgttggcaaggatatagagaaactggaatgcttatatattgttggtgggaatgtaaaaatgatatagctgctatggaaaacaggacggagtttcttcaaaaaattaaaatatagaaccactatatgatctaacaatcccactcctgggtatttatccaaaagaatcgaactcaaaatatcagatgtttatatttccatgatcattttagtattattcaccgtagccaagatgtggaaacaacttaaatgcccatgaatggataagtggaaaaagaaaatctgctaaatacgaacaacgatatataattcatctatagaaagaaggaaatcttgccatagatgatcaaaaagataaaccttgaggacattatgctaagtgaaataaaccaatcattaaaggacaaataccgcatgataccacttatttgaggtatctaaagtagtcaaacacatagaaacagaggaggaaaatggggagttgctattcaatgcatacaagtttcagttacacaagatgattaagttctagagaactgctgtacaacattatgcttataattattactactgtattatatagctaaaaagtttaatagtagggtaaatttcatgttaaacattcttactgtaatttaaaaaaataatatatagacgatttttatgattatgtgttttaaattgctttaatatgacacaagtgggctaaatggtaaagaaatatcgataaatgtaactattgaagttagtaatttaggccaagtgtggtggctcatgcctgtaatcccaacactttgggaggccaaggtgggaggattgtttgagccaaggagtttaagaccaccctgggtaacatagtgagactttgtctctacaaaaaataagaaaaaaaattagccagacatggtggcacatgcctgtagcctcagctactcaggaggctcaggtgggaggatttcttgagccagggaggttgaggctgcaggaagccatgattatgccactgtacttcaccctggatgacagagtgagattgtatctcaaaaaataaataaataatttatgttcatcaaaacacattacaagaaaagtgaaaaaataatctacaaactgggagaacatattgaaatatacaaaatcagtaaagcattagcaacacaatacataaaggattcttgaaaatcagtaagaaatatatggataacataatagaaacatagacaagagatacagacagttctcaaatgcagaaatataaatggtcgatgaacatgtaaacaagcttaacttcagcagtagtaagggaaatacaactaaaaaacccagtgcttacctctggatttccataggttaattatggtggcctaaatgtgctcagaaatcttttctctaaatttacagattaagagggggaacaaataaagtcactttcatagtgtagctacagttcagatgaaaacagaaaatactgcaaatttgatacattaaactgacccttgggaaatacctatccaaaccaataaagtaggcttccaggctcacaccagagctgagagtcatgaggaaattacacaaaagagaggaagagagatgttttgttacttatggaggagaacaaatagccaccagggttcactagcagaaaaaagaatcctgtcctaaatggaaaatactaagaacaggactgaggccggtggatcaagggacgtgctactgtgcagtcagatggcttagaaaatgcatgggtaagaggaaacagttttgggaaggccacacttctggggataaggaaagccttggaaaagcaatgctttccttggaagcttagcgaggaagggaaggaagtaaggaaatgttttagataaggaacctaatgaacaggatatcagaagtcagatccaaatagcattgtttagtgacgtaagaggatgctcttgaaaaaaaatctggtaatatacagaaaaaatatcttcccttgcatcctcccttgacctaactcttccttttctgccacacagaggatcaccaattgatatggtttggctccatgtccccacccaaatctcatctcgaattttaatactcacatcttagggagggatctgctgggaggtgactggatcctggatcggggggtggtttcctccatgctgttctctcatgatagtgagtgagttctcacaagatccgatggtttaaaagtgtgtggcagttcccctcttgctcgcttactctcctgccaccatgtgaataaggtcgttgcttcaccttcccctttgccatgactgtatgtttcctgaggcctcctcagcatgcagaactgtgagtaaattaaacctttttcttcataaattatccagtcttaggtagctctctataacagtgtgaaaactaatacaggaaactgataccagaagagtgaggtactactataaagataacttgcaactatagaagtggctttggaagtgggtaatgggcagaggttggaatagttggagggctcagaagaagacaggaagatatgggaaagtttagaacttcctagagacttgttaaatggttttgaccaaaatgctaacagtgatatcgacaatgaaatccaggctgaggtggtcttagatgaagatgaggaaattattgggaactggagtaaaggtcacttttgctatgatttagcaaagagactggtggcattttgcccctgccctagagatgtatggaactttgaacttgagagagatgatttagggtacctggcagaagaaatttctaagcagcaaagcattcaagacgtgacctgactttttctgaaagtatacagtaatatccgttcatgaagagataatctgacattgaaacttatgtttaaaagtgaagcagagcataaaagtttagaaaatttgcagcctgaccatgtggtagaaaagaaaaacccattttctggaggaaattcaagccttcaggtgcatacatttgcataagtaaagagaaaccgaatgttaatagccaagacaatggggaaaatgtcttcagggaatttcggagatcttcagggcagatccccccatgacagacccgaaggcctaggagggaaaactggtttagtggtccaggcccagagctctgctgctctgtgcagcctcaggacatggtgccctgcatcccagatactccaactccagccatggctaaaaggggccaaagtgcagcctgagccattgcttcagagggtgcaagccccaagcgttggtgacttctgtgtggtatagggcctgtgggtgcacataagacaagactcaaactttgggagccttcccctagatttcagaggatgtatggaaatgcctggatgtctaggcagaagcctgctgcaggggtggagcccttagggagaacctctgctagggcagtgcagaggtgaaatatggggttggagcccccagagggacttcactggggtacttcctagtgaagctgtgagaagagggccactgtcctcccgaccccagaatggtagatccatggagagcttgcactgtgcccctggaaaggccacaggcactcaacaccagcccatgaaagcagctatgggggctgtatcctgcaaaacgtcaggtgcacagctacccaaggccttgggagcccacacttttcatcagtatgccttggatgttagacatgggatcaaaggagattatttttgagctttaaggtttaatggctgccctactgaacttcagacttcaaaacaaagtcctggaactcctttgttttgacccatttctccctttttggagtgggagcatttacccaatgcctgtatccttattgtatcttggcagtaacttgtttttgattttacaggctcataggcagaaggaacttgccttgtctaagatgagactttggacttgggtttttgggttaatgctggaatgacttaagactttgggggactgttgggaaggtgtgattgtgttttgaaatgtgagaaggacatgaggtttgggaggggccagggatggaatgatatgctttgggtctgtgtccccacccaaatctcatcttaaattgtaatccccacatgttatagagggacctgtaggaggtgatttgatcatgggggaagtttcctccatgctgttctctcatgacagtgagtgagttctcacaagatctgatggtttaaaagtgtttggcagttccctccttgcttgcttacttgcctgccaccatgtgaagaaggtccttccttccccttccctttctgccatgattgcaagtttccttaagccttcccagtcatgtgcaactgtgaatcaattaaacctcatctctacataaattacccagtctcaggtagttctttatagcagtgtgaaaatggattaatacagcaactattgctagttaagaaaaatgtaagcataaatagaaataattcacataatgattctagaaaagaaatcaggtaataaaaatcagacttttcaacctgaaagcctatctcccacaaagagctataatgcaaaacactaatataatacacagattaaattaaatatagaaaaacaaggaatttaaaatattaaaatacttcatgagtcagaaatccaaaaaaatcagtatagaaatagaaatataggggctgatcaaggtcagaagataaatgaacaaaagaagaaaaataatcttataaatgaagactgacttcatttataaggtgcccacattttgtctcatattatgtaagggacataagaacaaatatagaggagtaaatgaagcaattcaaaaaaattaatggaactaaaacataaaaagaggtatgaagggtgcaaacatgtaatagagaagacatgtgtaaagatccaatatgtgtatagttggtgcccatcaaaacatgaaataaaacagaactaacttctaaactataattcaggaaagcatcactgaaacaaacaaacaaaaacccaaagctacatatctggcccattgtatacctgggaaaattgacctgttgtaatcaacttcaaagtatattctacaagaacaatttgattttaaagtatcataaaatcagacaaaaaacctggtcacttacagagtaaaatgacaaagttgacaacagacttcttgatagtaatatatacaacaaaacaacaatagagcaacattttttagatcctcaagaaaaatgtgtgagttaagaattttatatttcagcaagctgtcctttatgaataaagtttacagaaaatagaaaaatattaatgatctcagggaatattgtattcagagacttacttcgatgattctgttatgacagtgctttcaaatgttaatacacatgggaattgcaagcagactttgttaaaaatggagattattagtctagagatgtgagtgaagaatctgtgtttctaacaagcaccaaggcaaggtgatgccaatgctcctggctcacaaaccgtactttgggtagcaaagtaaaagaatgaaacagccaagatattattggggaaacattgctagagactgttggtaagcactgaatatatttgtttgcaaatataaacacctgtctttaaatgcctttacacctgtcttctttattacatttttgttccttttatacaactttttatgttttagttgcattaagttttttgaatcttttcatttactcttctatatttattcttgtgctccttacataatagaagatatagtgtgggcaccttgtaagttagtcttcatttataagattatttttcttttctcctttcatgtatcttttgatcttgatcaccccctatatttctatttctacactgattttttaaaacttctgattcatgaagtcgtttcatgtttaaattccttaaacatgaaaaatttttataaaatacagaaaaaatagtaaagtaaaatacatatgatgaaagtaactataaatgctctgataaaatagatgcaacaaaattaccaaaatagggagagaaaagagataaccacatgaatactagaaggaaaatcaacttgatcttacagatatcattagtaaggaaaaaagattaagggttatatgtaggtaagttttaatacaaaagttttaaatatcaaaagaaatacattacaatatacatcttttaaagtaaaaaacagaacaaaaaactatattataaagatacatatttatatgctaacatagtaaatataagatagagcttagccctaacctaccagttatgcttaactcacctattagaagaaaaatatttttagattggcttacaaaggaaaatccttgaaaatgctgacacacacacacacacacacacacacacacacacacatgcacgcacgcacacacacacacacaaaatctcaacaataataaaagccaaacataaagagatgggtaaaggtataccaggcaaatgaaataaataaggaaatttggcaaaatgcatttggctgcataaagaacatgattcacaatgaagctataggagttaatatatatgtgacaaataacatagctgtaatttcataaaatagaaaatatagatgaaagaagagtttaaatagcacaaaaataatacgacactttaacacagcattttcagtccactttaagtccatataatataatactttaagacatcactttcagtcaggtacacaaaaataagaatggatgtaggtaacttaaacattaaagtcagtaagctacagcttattgatagatacctaaatttgcactctgataatatagaatataaagttcctttcaaataaatatggaaattttaaactgtatatttgatcacaacgagaacctcaaaaatttcaattaggcagaacaaatgaaagcatgttctctcattatagtagaaaaaagggaaacaggaaggcaggagggaggaagtaagggaaggagcaagagaatgaaggataaaagcaagagagacaaagtaagagagaaagaaagaaaggaacaaagagacagaaagaaaaaagaaaggaagaatgaatgaatgaagaaagaaagagaaacctttccatctggaaatatatagactatattttaaaaagcaataatctgacaagttcaatatgttaatcacctatggatgtgtttgtattgcctattttttctcttggtcctgtcttagtttgcctgttaaatttttattagatgctgaatatgaaaaagtgatgtgactcttgatgaagtcacctttctccagagagatttttctttgtcttctggaaggaaattagactaggtgtcggttagtttaatgtagtaagagatttctcaaaagaaggcatacaagtggtcaaaaaaaaatatgaaaaaaatactccacatcccttatcatcagagaaatgcaaatcaaaaccacaatgatataccatttcacatcagtcagaatggctataattaaaaagtcaaaaacaacagatgctggcaaggcttcgtagaacaggaaacacatatatacatatatgcacagtaagatttccatactgttggtgggaacgtaaattagttcaaccactgtagaaaggagtttggagatttctcaaaggacttaaaacagaactaccattccatccagcaatttcaattactaggtatatatgcaaaagaaaacaaatcgttctactgaaaagacacgtacacccatatgttcattgcagtgctgttcacaatagcaaagacatgggatcaacctaagtgcccatcaatggtggattaaagaaaatgtgatacatatacaccatgggaaaccatacagccataaaaaaaacaatgaaatcgtgtcctttgcagtaacatggatgcagctggaggccattatcctaggtgaattaacacagaaaaccagaggtgtttccacttataagtggaaacaaaagattgggtactcatggacgtaaagatggcaacaatagactggggactactagaggagacagggagggagaaggacaatggttgaaaaactaactattggatagtgtgctcagtacctgggtgacaagatcattcgtttactgaacttcagcatcacacaatatacccaagtaataaaacagcatgtgtacccctgaatgtaaaataaaagtagaaaagaataaagtaataatcataaaaaataaatcttcacaattgtggacttttaaattaagcatgttctttttaaggtgaaaaatgtttcaatatataaaacttttattgctaaagtaaaaaaaaagcgttttttgaagtactgaagtattctattttgcatgtaatatttcaggaatcccagctaaaactttgtttactaatgctcctcttaccttgtaggccctgaactccaaactttgtattttcagcacagtaagatttccataaactgcttagttttaccacgttttgacctgtggtgcttaagaatgagtgaacgcctttaggggaaaagtattcagactcttgctcatgtctctgtggtttctttttcttgaaaatcttggaatctcaagcattggttgtcttggtagccctgaactgctgaaatttttgctcagcatctgaaactatgtctgcatcacttataaattagtaaatatagtctatagggaaacaatgaaacagaatttggggctcatcttggtgaatttttttttctctctgggattggttaaatcctggatgtttttctgtatgtttgatgttttcagattttttttaagtttttttctttgctttttgtgttttatcaaggtttatagttgctctgcatagaaagattcgtttgctgcaaggcagatcattaagctgaaagaaagccagcttctattgtttttaaataacaaataagaggaaataatgagtagatttaggggacgattgaagaaaggggaaaacgtatgaaatagtcatattgacaagcagggatgcataaatgtcagagaaatataatagtaattctagataatgatgaatgccaattttaagattatactcatcattttaaagcaaaaccattcagcagaattatgtgatgttatctagccagaaaggagtaaatcagagatgacatgatggagaaagaataatctgaagtgtttataataatgaccaataggaatttctgctggcctttcaaaaagtgaagacaggaggggttaaatggatagtgtggaagtgttgaggatggccagtggtttggggatcataattaagttaatgaactgctgctaacagagactgtgcatgaatttgactgctgggtgtttagaggtattaatttcaccatgactccattactcatacccccaatctctcagtgttctaataaggtgtagcatgacaatctgtacctcatatcagggcaacgtatgagctttctgattcaattactctgaaacagaaaaattttgacttttgaaaagggataatctaagtgcagaaaatgattatacttattatggaagtgagtaggataagatcaatggtcaattcaaggaacagaaataatatcaaaaggttagaaaagttggaacaagggacaggtggacatgttgctataaattgatagaagtgttgtaggatagggtggactccacagaggagtccagggtcacaatttgagggtgtttcaggaaatgtttccaaaagagccaggtggagttgtgagaaccatactggagagcatgctgaattagaccaggattctacagtcaggtacacctccaaccattacaactggacctagaataaatttctgtttattatttcggtatccagaaggaatgctgttatagaaagagaaagaggactttaaattcacccagaccatggatgtgttattaacctttgtgaaatagagataatagtatttgcactgtatggttttttaaaggattaaatttttggtgttcttttttatttcttttaatgtgtgtacctactctatctatgaaaatgatcgataaaattcattttatggattgtacatttggtgtcaaggtttaggactctaactggccctggtcctaaatattttcttctctttttctaaaaagcttttttttttttcattttacgtagtacacttaagtcctgatacatttttgaaaatgtgtatgtaaggtttgagggttaggttgaggttaagcttttttgattgtttgctttttgctagatgatgtctaatttctccagcacagttggttgaaatactatctttcctctgttaaaatgcttttgctccttggtaaaaacttagttgagcatatctgtgttggtatatttctgggttttctatcctgttccatcgatctatgtgtctgtccctctgccaacatcacgctgtcttaattactatagctataaggtatgcctaacattggatagagtgatttctcctccttaatcgtttttcagtggtcttaggtcttctaggtgtagtgccttaatgtatgaattttagaataagcttatcaatatctacaaagaaaattttctgggatttttataagagttgcataaatgtaaaggttaatttagggacaattcacatatttactgttttaggccttccaatttattaacatggtatatctctccacaaattccttgatttctttcatcaatttcatcaaatgtaatttttaggatacagctcttgtccatattttattacatttatacctaagtatttcattttctgtggacacattgaaaatgttattgtgtttttaactttggtttccacatgttcattattatgctttagctttttgaatatttctttggcattaggctgtggtctatggtttttccttaccatcagtacattcacctccaggaacatttttatcaatttgctgtcttcgatctgccatgggcacaaagtagatcatgtttgcaggatttgagacggatagaattattcgaggctttaagagatgcttgagggtctcttttacatatgaaatctgtatactctgtgacagcttttttgctactcatggatatttttacttattctgatattcatggctatttttatggataatgaaaattatgtctgaataaataatattactgacatgtcaaggttttcagctctgaagacattggtgacagacagcaatgtaaataatacataaactaaaattcaagttagggcttattgccctaaagcccctttaaataatgtgagcataatatgctctttcaaaaagatgatagtttgatgtctaacatgtagaatactgatgagctttaaaggcatttcttaaagttaaaaaaatatatttcccctgtgtttacaaaatgggctcatgcaaataagaaaagtttgctaatttttggttcctagcattttaattactatgatagcacatatattactaagtaaacaactagcagtgtttactgttctgttttcaagtcttatcaatagcattgatacaaagttagttaagataatgtaccctatatttaattatagaaatcattatcatgtacctgttatttaagaaaagcttttttttttcccatatgattgttggctgcacatatgtcatcttttgaaaagtgtcttttcatgtcctttgcccgcttttttaagggttttttttttcttgcaaatttaacaagataccatctcacagcagtcagaatggctattattaaaaagtcaaaaagtaatagatgctggtgaggttgtggagagaaaggaactcttatacactgttggtgggagtgtaaattagttcaaccatcatggaagacagtgtggtgattcctcaaagacctaaaaacagaaataccatttgacccagtaatcccattactgcatatatgccccaaagaatataaatttgacccagtaatcctattactgggtatacaccccaaagaatataaatcattctattaggaagacacatgcatgtatatgttcattgtcactattcacaatagcaaagacatggaatcaatgtaaatagccatcaatgatagattgaataaagaaaatgtggtacatatgcaccatgaaatactatgcaaccataaaaaagaatgagatcatgtcgttttcaaggacatagatggagctcaaggccattatcctgagcaaactaaggcagaaacagaaaaccaaatactgcatgttctcacttataagggagagctaaatgatgagcacacatggacacatagaggtgaacaccacacactgaggcctagtggaagatggagggtgggtgaagggagaggatcaggaaaaataactaatgggtattaggcttaatacctggctgatgaaataatctgtacaacaaacccccactgcactccagcctgggtgacagagtgagactccatctcaaaaaaaaaaaaagtatataacaaaataaattacttaatggaatgacaaaaaaataaagaaaagctgaattaaccacatgaagatagaggtttcacaattcataaagttaattaaataattgcataattgattagtttcactttgctttggcctatgtaaaccaactcattgttccccaagcattccttttatatacccccctcagagctgctgcctatattttcccctgaagctggcttcctgttgcaaaatgccaatgatttgtcttgtcttcctagtgagataagcaagtaacctgcatgtggaaactttttggagccatttttaaatgcaacctcctatacatgtcccccatatagtagacactctataccaggcccatgtagttgttaaatgaaacgaagtacttatggctcatgagatgttcttctctacagatagtgcaaattaattttgatcaaatttgcctaaagtcaatatttttagtggttggagaaagtaacagtaataatttttcatgtattttatcatagaaaggtatatacacgtgcacacatgtaaagtgttcaagtcataagtatgcagattaataaatttttgcatatgtatataccatgtaactgctactaggatcaagattttaaaaagtatttttatgtcctctgaagcctcctccatgccttgttcaggcaattacttctcttttccctgaagtagccagtattttaaaaattgagatataattcacatattataaaattcattatttaaaaatgtacaatttagtagtttttagtatttccacaaggttatgcaacaatcaccactatctaattccagaacattttcatcatcccccaaagaattcccattcccataagcagttactttctatttcaacctcccctgcacccctgacaaccactgttctattttctgtgtctatggatttgtttattcttctcatttcatataagtggaatcatataatatgtggtcttttgttactggattccttcacttgacctgtttccaaagttcatccatattgtggcatgaatcagtactttatatttttatatctaaagaatattcttggccaggcacggtggctcacgcctgtaatcccagcactttgggaggctgaggtgggcggatcacgagatcaggagatcgagaccatcctggctaaacaaggtgaaaccctgtctctacgaaaaatacaaaaaattagctgggcgtggtggcgggcacctgtagtcccagctactcgggaggctgaggcaggagaatggcgtgaacccggaaggcggagctttcagtgagctgagattgtgccactgcactccagcctgggtgactgagtgagactccgtctcaaaaaaaataaatagataaaataaataaataaagaatattcttttgtatggatttcctgtatcttatttaccgattcattatttggtaagcatttaggttgtttcctgtaaccattattttgacatggatcttcatataagtggaatcatacggtgtgtatagcatttaatttgtaaatataatggggttatatgttcattatatgactgatagacattagggttgcttctaatttttggctgttattaacaaaaatgttgtgaaattcttgtatatatctttttaataacatatctacacacttctttagtgtatatacctaagacgtggtttgatgggttatagtgttggttgatgtttagttttattgaaaattaccaaagagttttgagtagtggtatgctatttgacatttctactgggatacccgagggttttggatgttctacatgttcttcaagacttgatacattgtcatccttttacatattagccactgtgatgtgtgtattggtattttattatgattttaatttatctttttcatacttaatggttttagaacctttcgaaatttttatgttagaaaattattttttatttttctgctttattgaggtataattgacaaaaattatatgtattcaaagtgtgcaatgtgagaatttgatatatatgtgaatgactaccaaaagcaagctaattaacatatctatcatctcacacagttacctttgttctctgtgtgtgtcgtgacagttattattaattacagtcaacaaggtgcacattaggtctctagaacttattcattttataactgcaagtgtgtatcttttgacaaacatctccccatttcttccaccccccccccgcccccagctcctggtagccaccctttaccctgtttctatgggtttgagttttatagattccacatataggtgagatcaagcagtattagtctttattcatctggcttatttcacttagctcaatgtcctcaaggttcattctacgttttcacaaatggcaagattccatgcttttccagtttgagtaatagccatatatatatatatttatatttatatttatggctattatatgtatatgtatgtatgtgtatatatatgtccattatatatatataatatatataatatattcctagaatatatatagaatatatatatatattcctagaatatataggaatattatatattcctagaatatattattatatagaatatattcctagaatatatattattatatagaatatattcctagaattttccatggcagtaatgcatgcataaataatgtgtaagaaacaacatatgcaccataataaatataatcgacatatagtagatatagcaaatacatatttgacatgtagctgatagcctgctggctattcccatcaagtgaaccatttccataagctctcttcactctttttcattcttttttctcctcaaaccgaatattttcaaatgacccatcttcaagttcacagattctctcttcttcctgagcaaatatgcagttgaattctctattgcatttttcactgtgttcattgtattcttaagctccagaattacctgtttggtaaagaattgtgactttactcactgaccctctaattttgttctcgtattacttttctgatgtctccgagttgtgtgtgtgtgtatatatatatattatatatatatgatatactataatatatgtattatattatatataatatataatatatgatatatgatatataatatatagtatattatatattatatattatgtatatgtgtgtatatatatattatatattataataaatatataaagtcatatataattatatataatatataatatatatatagatacacacacacagaactcagagacatcagaaaagtaatacgtgaacaaaataagaagttcaataaataaagtcacaaaaaagaaccaaacaggaattctggagcttaagaatacaatgaacacagtgaaaaatgcaatagagaattcaactgcatatttggtcaggaagaagagagaatctgtgaacttgaagatgggtcatttgaaaatattcggtttgagaagaaaaaagaatgaaaaagagtgaagagagcttatggaaatggttcacttgatgggaatagccagcatcctatcagctacatgtcaaatatgtatttgctatatctactatatgtcaattatatttattatggtgcatatgttgtttcttatatattatttatgcatgcattactgccatggaaaattctaggaagcatacttgtgcatataaatatttaaataactatacttttttgtctatttcagtggttccagaggactaaattcctgaggcaaactttacttataatgaagagtttaatttaccagaaagctcagtcaaatattgctatcctatttcaactataactaataatgtaacaggctttactaaatgaaaacatatcgatcagggtctgctttgttaagtgtcagcatagtgggagagtgaaaggaagagcttgtactctttgaaagatttctgattttattttacatagtcagtttacacatacatacactgatatatatatattttttcacacatacacgctgatatatgtacatgtatacatatacacactgatatacttatataaatctataacctatgtaagtgttagtgttgtgaaaaaatgtttgaatatgatttcaattgctgaactatattttgttttatcttgtttagcttttcttacacttaataatttcccaatcttttcaagataactttgtagctgttattttatatatacttgatttaaaaaatctatatgcacacagacacatgaatatacacacatatggcatatgagaatatgtatgtatgtatctgaatatatatatattcttttataccatcaactctcaaattctttttggatttagaagtaatataaaaaatataatcaatcaatatattctttacttcatttactactctgtgacctattttgactacctttactttctacagttggtgttttgtgtgtgtgtgtatatgtcttaaattgtataaataatttggaaagacagcttactttactttgctctctctattggaagactggtagatttaaacatcaactttcaaaatcacagtcattccaagaaataatttatttggcatctctaatttctgtttcatgtatttattttttctctttaaatactacctgtttgtttaataggtaactttgtttataatgtaaactttttttcaccattgaggtataatttacaaacaaaaattgcatatatttaaggtatacagtgtgatgttttgtgtatatatatgtaaaatgaaataatcactacagtcaaactaacctgtattacttcatacagttatccattttttgtgtgtgtggtgagaatatttaaatattcctttttaaactaaacttttaaaagtaaatttaaaaaattgagatattacacaatactgataagtgaacaaattatattataaataaatagtttgataaaatttcacaaagtggacacatgtgtagccaggatattaaaaccttattatcagaaccccagaagtctatatcccatgtcttcttcaggaattaaccaactctggccctcaagagtaatgtaaaccttgaccttcagcaccagaaatgagttttgcatttatgaactttatataaatggatatagagtatactcttttgtatcaagctctttttcagtcaacattatgttgttgagatccatggatttatcctatatatagttgttacttctttcattctcattgctgaatagcggttcattatgtgactgtgccacaatgtattaatatttatctatttcaacattaatgaatctttgagtaattttcagtttggagctatacccactgtatatatgctatacccactgtagttcacaagattcgctgcatatatacagacatttctcttgcatatatatctgcaagtgaaattcttgggtctttgaatatatgcatgttcaactgttacaatatagccagatgattttccaaagcacctcactcccacttggtatgaagtgactcattctttttttttttttttttttttttttttttgagatggagtctcgctttgtcgcccaggctggagtgcagtggtgtgaacttggttcactgcaacctccacctcccaggttcaaatgattatcctgcttcagcctcccgggtagctaggactacaggtgcccgccaccacacccggctaatttttgtatttttagtagagatagcgttttgccatgttggccaggctggtctcaagctcctgactggctcattcttttaaggatgggaacatcacttgtcatggggactaaaaagatcatggccagtagaaaacaatattgtttgtatttttctgggcagtaaatacacttaaaagtatatttctaattttagaaaatactttcacaggtatgtaaaagcactgttatttagtcaaatatctgcctgtaagacagtaaagacacgagattaagagcaaagcacagtagaagctctaaatttcatcaaagccctgcctttggaaagccagtggcccaagacatttgctgcctaacaagttaaaaaatggtaacaattgctgtttgttgttactgcaaaactaatattgtgaaaaacctggtagaattggttcacgatgattctgaagcaaaaactttaggtctcatttttatatatgaagtctagtcacaggaactttatctctaaagtgaaaccaatgaggtttaacctataatacttcactggttgcggcagccttttattgctaaatatgaccttttatttttaaataatggaagttaatttggtttggttttattcactacattgttcctgggttatttccttggaggttttgacacccctagagattgtcagagtgacatccagagagcaacttccttttgcttggcatgactgcatgactgcctggttatactttttatttcctttaaatataaaggtgagctttcttttcttcccaagaaatgaatgagaattaaattcctgtaaagagctacttaagctcctcattcccaggaaggattgtaaaaatattttatgtgcaaatgtcacttgcctgactctctccactggctttcactgacttaataataccagctccattagattcatgaagagagattaattaacagtgcataacttaattgtgtcaaaagaaggagagatttggtggtagctccaatgtctatcaaaatgtcattaatgcatttattcctttgtcctaaaaatagagggatcatttaacttattcattattattagaaatagctgatactgaattattcctgaagaaggattttatagataatcaatacaataacttagagcagtaaaagacctcaagaagaagccttgtttagtttactaccttcaggcacttaaagtgaaattatcctcattatccccatttgcacattagaaatttgttatagcttcattaatagtgttcagtctgtgaacactgagctagagggtagtggtagtagaataacttcactaagactaaagatctcccagattctgcctcattacactatacaattctacttttgtttcaggtgaaattgccattcctctttcaaatgcatttggaagattaaagagagatattattaagaacatgcaacatactctcatacacagttggttagagtgtaatttggtttaccttttctaggatgcagtttggcgacagccttaaagatgttttggcattttacctactaatttttcttctaaaaatttgtgcttagacaatctgatataggtacaaggttatttgttgtaacttgatttatgaaagggaatactggaaatcttgatatccaattataatgtaatggttaaattaattgtgccataaatatttgatgggatattgtacaaggattgaaatttggttttaaaatatgtatttcatagcataggaattgattataatgtgataatgagtcattatagcaagaaataaaatagtagagtttgaagttttgtaacgatggtatctacacatagataagtgtaaataatggaagagttttttcctctatgatttttattttccatattttatataataaatattaaaaagcattttaagtatattcaaagaacgagtgagaagataaagccttctttctttgactctctctagtcaaccatttctttagaggattttggtttaatttattgccttctctgttaattatcatatttagactcccttatcttctaaggttttgtgacattattgataccatagtgcatgaaagtgatagagggaagggacccaaggaaagtaacatttatcaaatgctaacctctggctcaggtccttttcatgtatacaataaaacttgtgtttcaaataagatgtcttcctctgggtgagtagtaatgtgatataacaacttaacagtgaatcctatgtctttatcaacatattgaagtatgtgatacatttgttggagctgaaattaaaaagtgcttaaagatggaaataaattggcaatgaaatttaggctgttctatggcagtggcggggcatttatggtttcctaataaataaactatagatttgatcaattggaccttaaataattttcaaaaatcagcattttaatttttttagtacagagaaccagaaaacatgagaaggtaccagatattatatttttttcctggttgagcttcacgaaggagcgtagcttaatagctggaactcaagagtttggggttttgctagtaatttgttgagaggacttgagcaagtcacataacctttatgagacacattcactttatctgtaaaatggcagtgaactaggaacagtgacttttcaaaccatgcctaattggatgcttcaggggagcaggctcaataagagtttttgctgatggatctggagggcctgtatagtaccaggcacataactaacacgtaaccagtgcttaataatcatcagctaaatgaatgactgaatgtgctctaagcaatcctgcctgggagtctgcctttccagcgaagcttctgtcagcataattctgcttatatctaatttatatgttgagcataaaggaaggtgttcattaaaaaaagtaaagaatgattttatggttgaaaccaagtctgaaatatctattgataattctgtgttactatttctggttattatttaaaaacaacaacaacaaattacaacacctcttactctcattttcttctatgtattactaaattctatgagaaagctgtgtctatactgtattcatggtagaaagaaggataatctgtgctttgacagataaatcagtgatgactagacagagaaagggaagatgggacatgccagtaaaaaggaaaagcatgtgtgaaggcaaagagtaatgggagaacatggcaagcttaggtggtgagaaaggtgatgttattggaaggcatggttggaggacggtagtaagattggagcaggattccaccataaagagccctgtatgcttggttaggactttggctgtagttggtggggaagcaagccatcagatattttaagaaaacagagatgacatgataatatatgtgtttcactaagagttctgtagtcaaaatgtggaggttacatctttggagcttgagaatatttgctaagatacctcttgactttgggtttagtgaatatcataaagaatttgaaaaaggttttctttttcagaccatgacattcatttttttttccccagggttgttttgcagaattctgaaaaatggtttcttacatactgtcattgttacaggaccccaacacttacccaaagatagccgttgggtcagggtttctgcactacagtcccttctgtggtcaccagaaatatgttacaggaaagcggtcctgattcagaccccaagagagggttcttggatctcatgcaagaaagaattcagggcgagtccacattacaaactgtgacttattaagcaagtttattaagaaagtaaaggagtgaaagaatggctactccatacacaaagcagccctgagggctgctgattgcccatttttatggttatttcttgatgatattctaaacaaggggtggattattcatgcttcccctttttagaccatatagagtaacttcctgacattgacatcgcatttgtaaactgtcatggcactgatgggagtgtagtagtgaggatgatcagaggtcactcttgtggccatcatggttttggtaggatttagccagtttctttactgcaagctattttatcagaaaggtctttatgacctgtatcttgtgccaacctcttatcttatcctgtggcttagaatggcttaactctctggaagtgtagcccagtacgtctcagcctcattttacccagctcctattcaagatggacttgttctagttcgcatccctctgacatttccccctcccctttataagagaacccttaatcataagggttgcagagggatgaagatccaccttctgtaatgtcttcaggcttaataggggtgatgatattcctgcctaactattagggtctcttgtgttcaggtaaagaggagcttagtcagaaaacatcagtatggcgagggccatttataactcttgagtttcgacaagaggtgatatctggaagattgataagtgtttagtttaaggaatcattcagtaagcttgttctgtattcctacacaaagagtataacagtaatatattccacaagggcaaagcaaaatgaataaagttattccaggtaaactaaattagaagacttttcatgaactaggcaactgttggaactaagctgatatgggcttgttagctgattgtaatatgcccagaattagaatactgatccaggtttttatattacccatccctcttgtttcttctaaacagcagtcagagatcattggttggttcacaggaatgagcagggttagcctaaattgcagaaacaaacttaaaaacaactactgagactagaatttagtaatacgtgtaccatagttcttgaaaaataatatttctctctccagtttctcatttttactaaagacaaattccggtaagactgatttgctttattagacttggcgtgataatttgtataaagttcagcaagaataattatatttcacataagcttcttaattggctttgatagaactctgtttcataaggaatctcatataagacttttttaaagccaagccctgccatgggtttgtaccctcaaatacctatgagttgagtaaattcctctccttttgaggttccacgataacctgtggctcctggacctgtgagaaagtgacattctttacttaccataggtcagaaaccctgtaaagggactgtgtaggcaaggtatgaggctagttccccaaagggcttttattggctctacaagtcaagtttgattccttaaaggaaagcaaaccattccagtcaaagtcttggtaaaataaccaatttctccagttgtgtcctgttacaaaataaaacagattcttattgcacttaagcaaataactatattgccataagttaagaatactcataactagtttccaaattctggagaaatcagttagagagaaacaaatatgttctaaattttgttcacagcagtatactttgctcaattgctacaagctgtaaatagctcaaaagaaaagattctttgactctgaaaaacaaaacaaaggctcagcaacgttttaagcaaagttaaaaagttttctattggttaagttaattcaattaactcctgttctgtttgatattcatgaacgttccagctcttcatgagagttctgaaagttattttctctattctaatgttacaatttccaaaggtattagaaacctgtgtttaagaacacctgctagagttctatagtttattacaaaccaccttctaaagaggattaaaacaaggcaacagttgactgtggttgataaaaagttttaggacagccacaattaaagccacaattgataaggaactttggttacttctgtggcatacacagttttacataacaattataattattaataacatacactaagtcatattagaattacaggagtttcccataactttggaacatataccagtaacatatttatgcaaatacagtccaaagaaagcaaaacaccatttcacatttgataatgcttcctgtatgatttttataccaaataagccaaacttcacctttataataatgtactattaatgttaaactgaatttttcataaaactttatagacatattaactcaattttaatgtttaaccataaggttagattcttataaaccttttataaccctttacatttttttgtgaaagagcagatcagtgctctaagaaaaacctgttgtgcttctattccaatgtttaatttacagaaaaactgaataatacctctttaactttagccaatatgtttacacacagaatcttttacagttaatttttataaaccttccacaacctgtttaaatctttagctttattctatctaacttaaaacaccctttacacacaaaaaaatccacattcccaggccttcttagaatcttttaccaaaagtccattccactttccttacacaccttacatgtaaaactgtatcttcagtagtctcaattacatgttatgttattaacttttagtgacttttacttttggtgaaaaccctggttggtaagcaattttaatcatgtactaggtgtggagcctagcctgagatataccaggcagaagtgcagataagaaccaactctccagcatagctagggggcatgactaactccacacgtccctaggccttaccttacttaagaaggcaagttgtacagtaagagttatagtgtcattttatgaagcatttaggaggcctaacaacctttaaattgtacaacattttttgcataaattccctttaacaaatcctttcgcagcttacacagaccatctgagacattcttggactttctgacttgctctaaacatccctccttttaaacaaccagtcattttactttaggacaagaatttacggtacaagatccttttttatataaaatctctttctttataatctttgtatagctagggggcatggcgaattccacatgtccccaggtcttatctataatctaatggctttaaggtaggtaaatttaacaatttttaaaagttcaagaagcagtttatgaccttaaagcatttagcaaacttaatatctgacctgcataatttagactaaatgtttttattttattaataatttttaaagctgtttttattttgcaaatattactaaagttacatgaactaaaaggcattatagttttttattttgctttcagaatattgaagtgcttatttttgtttcagccaattaattagagctcttttatataaacattacatacaacatatatatagctacacagaaagacagaaggttactagagtagttgtcagatttttcatatgcaagtttctgagttattatttgggttactgtgtttaggttcatgttttttattttttgttttctttgacagagtctaatccaacctctgacttggagtttcaacaagtggtctctgggcaagatggtcaccctgagtaatagaaatgataagaaagggaaaggagagagagaaaagcattgcctgtgcagtgtggggaaggcaaaatgatcagggaggccagagaaagaccttcccattgcagtgacactgaaaagttcaggcagctgcttcttggtagcaaagggatcttttccagcaatcctgtcagctctcaagtttcccctttcagggaggaaaaacctccccatatcccacaatcctgtacatgcctaaccctgtcacccacagccatcagcaaagagagcaaggcagattaatccaaagagaatagcagttaacatcccatagtgccaaacctgttcttagctgagagggactttaccaagaggggcctctaaccccctaaatcttagaagggactctaaccctcctaagttgggcctcgaacccaatgtcagtcaggcatccttgccttttattaagaggtgcctctaacccactctgtcttgggagagactctaactcccctaagttgagcctctaacccaatcccattctttatctgggttgcccaccacttacccaaagttatccagtcagtgctgcggtctgcttcctttgtagggagggtggtttcttcagtatcgtcccttctgtagttcaccagaaatatgttacaggaccccaacacttacccaaaggtagctgttgggtcagggtttctgcactatagtctcttctgtggttgccagaaatatgttacaggaaagaggtcccgatccagaccccaagagagggttcttggatctcacacaggagagaattcaggtcaagtccacagtacaaagtgaaagcaagtttattaagaaagtaaaggaataaatgaatggctactccatagagcagccccaagggctgctagttgcccatttttatggttatttcttgatgatatgctaaacagggggtgggttattcatgcctcccctttttagaccatattggataactttctgacgttgccatgacattcgtaaactgtcatggcgctgatgggagtgtagtagtgaggacaatcagaggtcactccgtggccatcttggttttggtagaccagcttctttactgcaacctgttttatcagcaaggtctttacgaggtgtatcttgtgccaacctcctatctcatcctgtgacttagaatgccttaactgtctggaaatgcagcccagtagctttcagcctcattttacccagcacctattcaagatggagttgttctggttcacatgcctctgacaccatagctcttacaagaaaatttattgctcatcttaacgagtctaatttattaatattctgttgcaaagaggggacaaacaactctgaaaacaaacaaaagtcacttttaacctaagtattttcttctgaaatataattttatttgtttgtaactatgaaatcctcattaggaaacctacctacaataaattggatctgatattcaaggcagaatacatggaaagtgagaccagtgggccaggtcttgaatgataattttactccatcccttaaaaccaagttttgccttggctaagactgtgattaacatttcatttccagagtaaataacaagatacttatattttgatgacaaaaacatcatgtaacacacatgctctgtctaaggttggagaaggaaggtgcttgccagtgggtgtgactttggttgatctttttagcatttagttttaccttgtcactttttgatatctggatataagtagataccatcaatcaaaataataaatcaattagtgtcatatgttaagtgaaacaaaaaaggaaaggtgtactcataatgtaataaaatcctcttttgacatgccaataaacagagaatattgcaaatactggactatttcatttgcaacatgaatcctgaaaaacattattaaaaggaaataacatgactattaccaaaatgaatagaaaacaatgaaagtcctatgtggtaaatggatcaaaatagagcagtctatttttccattaaggtattcagtgtaatgtttgtgtatgtgtgtatgtatttaaattttttcgttcttctagagctaatttcattttcaactgggaaaaaaatattaaccttaatcagtgcttaaaatatcttcaggtttgtgctgaaatattttcttaattctgtctggaaaccagtcaaactgtccagatgaagactgcagacagagtggaaagtgaaaaaagaaaattgcttttgtagagagtttaagcaacaataaactctgtaggaagacagatgttccgtagtgataataagagctagtatttcctctgcccttgctatgtgccaggctaaactaggctcaactcatgccctttcatttaatttctgcaataagcctaagatataagcactatcattatccccatttcacagatgaggtttagaggaattaaataaggtgctccaggttacaaaggttgtgatagttttgaacccagacttacgtcctcttgagcctgaccttttttgctgcctctaagtaaagactcacaggcagcacatgcttttatgtcactctggccatgctcccatcataccacttttttcattgtattgcaattgtccctttacacgcccacctcccacactttctggttagctaacctgaggcaaacacagtgtcttatccttctagttctgaggatttagcacagtgatgtgacccattgtggaagctcagtaagtgcctatagaatgactaatatattgtccaaagtcagtaaaggtttatatattaaataaaacattgccttatagaaaataactgatgtgaaaacagcgtcaattacttttaaagctgtgttaggcattcctttcctcaaagatcagatttttcagaaaggtgggtgagcagattgctgctgcctatagaaatttgagggagtatgaaaaaaacccagagatgattaaataatgtgaaatgtatgtagagcattaagaaaggataagagaagggatactgaaagcataatttaattaatggtttttgcatttatgatgggcttgtcttctctacagggaagcaacccagttttcattgatagtgacccccaaataaaaggaatagtcaggggacattttcaagccttaggaaattttttaaagcttaaaatgcaattagtagaggaaagaaaactattttatatttattaaaatattatgcagtataacttaatggggtaaatcaatttagcttcagctttgagggattgaaatccgatcaaagaaaatcatttctggctataaagaatagtttacaaagggggtttgaggaggattctaaatgagtttgcacttgcatctttaaaatgggtggtattaacttccgcaatcacatcttgctccacgatgttctgattaaatatgatgataatgtccattttaatgtgggtctttaatcaccctgtcagaaagctgtagccaataaaagctctctaccccttgctgtataagcatacttctgccatttgcttcctcttttaaaggatgcctacagcgtgaattctgctactgcctgcagtagtcttcagaagtcagagaccagaatgaacaaggactgccatacaaaataacatacccaccctgccagcactgacatttccaaccacccaagccttacagaaggctggtcaatacccttgtcccttcctggacatgaatttatttgtaaaaggaaaatcttcagagtgaaaaaaatatatcaagagtggagttagtctgccagtgccagtatgtcaagttgccagggtgcttttgttgattttgttttctgaatccacctccaatgtggaattttgatttagttataaaaaaaattctgaaacatctgctagattaaaatgaatgttcatgccctattttacttgactctttgatgaaatgacattaacttttttatgagactcttcttgaccacctcaaaactgttttgtttttgttttgagataaggtcttgctctgtcactcaggctggagtgcagtggcacgaccttggctcactgcaatctctgtctcctgggataaggtgattctcccacttcagcctcccaagtagctagaactacaggcatgcaccaccacggccagctaatttttgttttttttgtctttttagtagagacagggtttcaccatgttgcccaggctggtctcgagctactgagctcaagtgatctacccgccttggcctcccaaagtgctggaattacagaagccaccatgcccagccaaggctgtgttctttctgaggggagatccatactcttctcaaagcatttactacatagttctgcattgtcatggtccatatgctcatcagcccatctcagtggattattacctccttgagagcggagctgtgtcttgttccctttgccttcccagtacccagcaaggtgtgtagcagtgtagcagacatagtcatagtcaataaatatttgttggatgattgtttttctgaagtggccccttcctctttccttttcacttattcatctctcaccttctttaggtcctctccatctgtcccaaggacatgagagctgatatctgtgttcatctaaaccggaaggtttttaatgaacatcctgcttttcgattggccagcgatgggtgtctgcgcgccttggcggtagagttccaaaccattcactgtgctcccggggacctcatttaccatgctggagaaagtgtggatgccctctgctttgtggtgtcaggatccttggaagtcatccaggatgatgaggtggtggctattttaggtactgtgaactttcctaatgtagtagcaaatgcgtagtaacagttttagatattttgcttttcgcatttttaaagagaaatttcctttgtttggtaactttggaaattgggtcactaatgagacgtgaatcttaatgaaaactaataatgctatttcagcagagaacattagtatcagtcacaacctaatgggctgagtttgattaaactttctttggcaacagtaggacagtaccttttagactaaaggtggtcgcagcctaacgtgccttgtagctccatgttagtaagtgtgaaaatggcttgtggaatgattgacgtggtagtgatgaagggtgttagtctcagaagggcaacagaacctgtctagttcaacccttttctttagagaggagccaagtgaggtccagagaagcttagtgactttcccaattagtaaatgaatggaggcttgaaaatagatcattttaccccagaactttctccctcatcacggtcaacctaagtagtgagctgaaagtgtggaggaggttaatgagtctgactctttatagcagagtgatcgcagtataagtaaattaaatttaggtttataaagctggttctgtcctctatattaataggccataaaaattatttggctaataataaattcattttaaaatttagagcattttagaatttagaattcagtagatagttgtactaaccacaaccacaacaataaaagggcagtaacagtatatataagtgataaaataaaaaatgttgcatgtttggggacagtgtaggatatacgcttggcaaaaaaaaaaaaaaaaaaaaaaattgccaaatgaccttttagatcattttctgctcaaatatctgcagcagtttcctgaaatccacagatataaaaggaagtaataatgaggtcagaggagaatcatttcttttttttttttttttaccaggtaaaataagttagaattgcaggatgtcgacttcattttgatcacattgttcatggcttgtgtctcatgaaaaatgagctcaatttttaaactattggattttcagctactgaggtcaacctaccatagcttgaatgccacttattctcaaaagtaaaagattaactgatagattttaaaaactacaaaagcaaaatccaccacaatataatgaaaaattgacttcaaaaagcaccattacttgaaaaatatagaattgagaatggaaaagaaatgacccttcatagggaaacaggttctgtaaaaattgtgagttctagaaaatggttcagggttgcaaatgactgaataccaaggtttgtaagcctttccttaactgcatataaataatattagaattacagttagatttcttctaggaactgtttttttttttcaagaagaaaatacgacattttagagtcaacattctgggtatgtttaatgctcgttagtgcttgttctgctttgtttactggagtataaaggagataaatataacccttcataaaaagttgtacatttcaccagagcaatcctttgtggtaaaatgaagcatatttacactctgtaaaccattcttgtttgcttaaagaagaggatacatacacactaagcaaactattcttgtttgcttaaagaagaggataaaatacaaggccaaaacaaatgtattttattttcctgaatgtccacatcaaacgtgggtaggaaaaaaatatcaaatgtattacatgaaaatgtaatatcatgataaccctcatgataaattacctcagctgtagactcattattatttgctttgtcccgttttcttcattacaacttcatttgggtaactccttttctaaaagaaggttggagaaagtcctgggtacagtgcctctagcctgggtctgctcaaatgagacaatttgctcagtgagacagacaaaatgcattttcctttcattttaaaataaaatggtaacttgttttgcccaatgacacagtaaaaatgaacacaggacccctgggtattgcacccatctcatcatatatctgtcacattttattattttgagtttgtgctttttgttttctctcctcaaaagtcttgggattcagagacttttcacatcttgtgcttaatgagtcaaattatacggacaactctctggtgacctttcttttttttctataggctctgaaaaagactagttcattcaaaagcccatcagatcaggattttttgtttgtttgtttaacatacaaaatgctttaatgatgttttaagaaaggaggaggaaaatagtaacttaccagcacctgttttcctgattctcctcttcttcctcttcttctcctcctcctcctccttttctttctcctcctcttcttcttctcatttttgatagtttaattttgaaataattgcatgcttaatgaaaagttacaaaaattatcagggtgtgaagggattatatatatattaaatattaaatatatataatatattatttaatatttaattatatattaaatattaaatatataatatattaaatatataaaatattaaatatataatcccttcacaccctgatatgtgtgtgtgtgtgtgtgtatatatatatatatatatatatatatatatatataaaggtatatacatagaaaagatatatatgtatatttttaagttctgctttattaagttgactcagtctttataactttatgtatttttttctttttggctttttttttttttttttttgagacggagtttcactcttgttgcccaggctggagtgcaatggtgtgatctcagctcaccgcaacctccgcctcccaggttcaagcaattctcctgcctcagactcccaagtagctgggattacaggcatgcaccaccacgcccggctaattttgtatttttagcagagacagggtttctccatgttgaggctggtctcgaactcctgacctcaggtgatccacccgcctcggcctcccaaagtgctgggattacaggtgtcagccaccgcgcccaactttatgtattttttaaatccttttgatttgccctggtactgagagtggtgggttaacatatcttatcattcatgcgttttatctatgtctccttgcatctcttgtggtttatgctatataacatttactgctgtgttatttggtgtacagattatttatgattgttatgtcttagttgtcaactgtggcctttggcatttaaatatgccaaaagccatcatgtttaatgctctttgcttttaatcttgcaagggtcagagaggaacaaaatccctacatccctcacatctgaggacacctcacaaaaatgggaacttgcctaaattagtctgataggagaaacaagaaggccttgctatctcttacactgatacatttgccagttaaaaggtagagaagggaggttattttaaaattaattagaatctctgaatccaaaaacaggtgcagtttcatgtttttggattcttgccactaaacagtctctcgataggcacgtaattctttagtgtgtcaaaagtgctaaggagtttaatgaataagttctgaagcataactaattaatggaaagataaaaaatttagtcaacaaataacctcctttaacactggaggatggcttcaagatgtttttctaaatagggcatatgaaatataattgcagttcatgtcttttttcaatttgaagttctttcaaagttctttcagttcctacacctccacctttttctgaccttcccactttttataaaacacaaagaattccaaattaagttcgtgatgcatacataatattttatattctttaatgtcttattcctttttagttcctatcctataattacttaatgtgaacagatttgttggtatggctgaaatagccaggttacttctcaatgtcttgacaagtatattgtgcctttctgaggttataaaaatgacatttccctgctaacaatagaccgtgctcctaagacatttgttttgttgtattttcattttgtctttgtgttcattgattattagaatcatagggttagaattattaaactaagacaatctctatctaagtcttttagttgtaacttcaaattctcaagagagctatgtttgtttatgtatggtttggatggaggggttgaaaattgttatggaattgggaaaaagcataaacgaggccaggaataacataattaaatcaacttaatacgaaagagagtctttagcactcgaattaagattctattttaagtagaatcagttatttaaaatccattgtaggctgggcatggtggctcatgcctgtaatcctagcactttgggaggctgaggtgggctaatcacttgaggtcaggacttggagaccagtctggccaacatggtgaaaccccatctctactaaaaatacaaaaattacctgggtttgctggcatatatctgtatttgggaggtatttgggaggctgaggcatgagaattgcttgaacccaggaggctgaggttgcagtgagctgagatcacgccactgtactccagcctgggcgacagagtgagactttgtctcaaaaaaaaaaaaaattataaacgtgtgcattatcaaagaaaatttataacttatactgctcaaaattaaaaatctccttatttttattacaaaaagaaaaaatgagatgtgaatgaataatattttgttattttgagaatctgtgagaatgtgatttttatgctgtagttatatttcttcctgtgcacttgctgttagaagtcaaatgcttcacagtttaaatccttaaaagggtttttcccaagttccagaaaatcattttcttttgcacccatacttctgtgttgtagatgcggaactgtgaaacatgtagatttgttctatagatcatgatgatgaaattacttaattcagatatttttataaagggcaaatcagttgtttgcttttaaaaacatgcatacttgtcttgttttaaacattttaagcagcaattataacattgtttatctatggttcaaaatatacacttttagagttcctcagcctgcaggttttggaataaaataggagttttaacaatcttggtagtttagattaaacttcaaaccctccctccatcatccttcaaaactaatttatcctatccccttgatatcttttaatcctattcttaatatcccttaccacagtcagtgttcttaaaattttggtcctgggtgtgaaaggaaaacatcttgggcccccaagatcactaaggaaaattcatgttggaaactgcttagggcaaatctgcctcccattctattcaaagttactaagatagatgcatatctgatttgcctcctttggaaaggctaatcagaaactcaaaagaatgcaaccatttgtgtatcacctatctgtgacctgaaagctccctctctgcttccagtcttcctgcctttgcttcaagttgtcccacctttccagactggaaccaatgtacttcttacatatattgattgatgtctcatatcaccttaaaatgtataaaaccaagctgtgtcccgatcatgttgggcacatgtcgtcaggacttcctgaggatgtgtcacgggtgcatcctcaaccttggcaaaataaactttctaaattaaccaagacctgtctcagattttccaggttcacatgggccatgactaccatcttagtcattagacttacctgctcataaatctatcatagaatcatagggttagagttattaaactaagacaatctctatctaagtctttcaattgtaacttcaaattctcaagagagctatgcttgtttatgtatggtttggaaggagggattgaaattgttatggggttgggaaaaagagcataaatgaggacaggaataacataattaaatcaacttaatacgaaagagagtctttagcacttgaattaagattctattttaagtagaatcagttatttaaaatccactgtaggcccagcatggtggctcatgcctgtaatcctagcactttgggaggccgaggtgggcaaatcacttgaggtcaggagttaataaatctatcatcagcttcaacctccatttcaatgtttcgctgccaccacaataatcttcctaaggtataattgtgtcaatctcctcattagtatttccagtatcttgaggataaaatgtaactacgagcatggcttatggggccatttgggtctggcttttgctcttctttctggcctgatttgtgtcattgtctatccctaccctattctcaccgtactgaattgcaggaagtttcctgagtttaacaaagttccctcttcctggcaggttgttgcatatactgctcctttatttagaatactttttctctcctttttagtgatttgtctcttgcttccttgttctattttatttttcccttattgccctagtctggattagatgcctctgttctgtgcttccacttggatgcctatacagggttcttagtacctcctatttttatccttcccctgtttatcctcccactgcacagtgaccacttgaaatttcttgttcctttttgtctctctgtcatctatgataggatctcttcaataggttctcagtaaaggctattgtgagtgagacagattagctagtacagctgttacttggtatccacaagggattggtttcagaacaccctcacagagaccctactctgaggatgctgaagtcccttacgtaaaatggtgtagtatttgcatacaacctatgcacatcatcctgtgtatttaaaatcatctctaggttacttataattcccaacacaatgtgaatgctatgtacatagttgttttattggttagggaataatgacaagaaaaaatatctgtacacatttagtacagacgcagccatccattttttaccccaaatattttctatttgtggttcattgaatccattgatgagaaacccacaggtgtggagggccaactctgctatattttgccaacaaactgttttcataattgtttcagttctgggtacccagaaaaatatgttgtgttctgttgactcacttgccaatttcctctatgccctctgttcctcctttgttgatagaggtttatagtaaaatgcatttctcaaaagcccgtaactttagtttagatctgttataggcagaagaaacattttcctactgttaactaggcaatttgaacaaagataattgagggggaaactgtgttaagtatctcagaccacacacggctctctgataagttgctcctttcttgttctccatcacggatccccagtgccaggaaaggaactaacttatacctgcttgttgaccataataagaaaactttaaattacattcattgaaggaaatttagctttaattcctaaagtgacattgcttttgtcatcaactagaatgaatgattcaataaatctgaattaatttcattaatacataaacatttaagaattaaaagggatttaaagaaaggaaaatcatattttccattagcaaatgagcccccacccacttaagtaaaatgtaaagccaacagataccttttgattttaatattccttaacaaacttttaaagtgtatttttgaaaaatacacttgggcgtctttggaagtctgattaaaataccaataattattaatggagtgctcattattttgtatacattattataccaagtcgtttaataaccctgtgaagaaagtaattattgtagtcatcttacagaggaagaaactgaaactctgtaatatcaagtggttctccctgggtcacagctagtaagtaattggtgggtacaggattttaattcagacctgtctgacattatgtgcatgcttttacccatcaaattacaaaaaaaaaaaatgatgctctggttaacaggaattttgaaatagaattttgaaattatagtacaactgtttggtttaatcttaatggaaaataagagtacctatattacctttaccaatttatttatttttattttttaaaaaagatttctctaacaccactgccaagaattaggcaccataacagtatacgttacaaaaacccttcaccaaatattacctaaggtacttagttaagtatgaattggctaaatcagctactaagtatctataaatactgtccttctccaagtgactggtttaccatgaggaaggtgtttaggactgaggagaactgagcccagagtgtgaatgtcatgagttcttagaacacaagatagggatgttacattccactctcctctttcatctgggttatggaagagttcagagtctacttagttggtaaatgttaaagtggaaatgaagctttctttctttgtgaggtctttcctaatttctttaaattaaaaacaatatttttcttctgtgctctgcttatcctgatctgtatacacttacttcattttcttctattttgtaatttttttggtctgtctctcttactcacaaaattaaagacttcttgagagccagatttctatttcctgaatctgcctatcccctcacagcataaagcaaatgtttcaacttttgaacaaaagttcaaaaaacttaaaaaaattttttaagtggtagcattttattttataaataaataatatagcataaggtaaaggaaaaacagaagacaagtaacaataatacaagaaagaaaaaaagaaaacctgtgctttgaatctcactcctttatccttgtgattgctttttgtttctctatacgcttctgtgatcactgcccatactcatacacatttctatcacagcaacacacctttattgaggtataattgatacacaaatatctacacatattgaatgcacacaatgtgatgagtctgtgtatatgcaaacactcttaataccattaccataatcaaggtaatagacacatcctaaaactcccatagctttcttctgtccttttttcatggtaagaacacttaatatgagatctaccctcttaacaaattttgaagttcacagtactgtgttgtgaagtataggctctatgtgtacagcagatatctaaaacttaattcatctagcataactgaaactgtatacccattgaacaaaaactatcccttcccccatcttccaagccctgacagccactattatattctctgcttctatgaatgtaactattatagacacttcatatgagtggaatcatgaaatatttgtacttctgcaactgacttattttgtttggcatagtgctctccaggttcacctatattattgcaaatgacagaattttcttcttttcaaaggctgaataatattccattgtatgcatacgccacgttttctttatcaattcatctgctgataaatactggggttgtttccatgtctacctattttgaataaagctacaatgggcatgagagtacagatatctctttgagattttgatttcaatacttttggatacatactcagaagtcagattattgcatcataggttagagttagggttgagtcaggatgtcagattcgttaattgaatgaggtagaaaagacagccattatttctcacacttcacagttgcaaaagttgtaagacttagttataatatgaacgatatcgtaggcttcaactctaaatgttttcttagaaaaagaaaacaggagagtttcaagatgtaattgatttccaaattagtcttttgcatggatttcttttttataatatgccattctctttcttgatttaggcatatatttggatttttatatgcaatcaatttgttcttaacactaatagtgccaaactcaggataatcagcatgtttattatcatttcttctacctccttaaaggtagcttcttactgatgtcaggataccttctctttacttctgcttaataagagctatttggctcattctttatgtgtgtaaaaaaaatctacgagctaaatcacttatttttttaatagataagaattattatttgcttctctgaaaatgtcttcaagctagtatttatgataatttttaacataatgactttggacatcaatcattgaagactggcagacatcatttctaaatgttttaaaagattttattctaataaaactatgtaatttcttaattttaatactcattttgttctttctgttcttcctttttaaaatattactttatgacccttgcagtttgtacatagttgaagtccatttaaaataatgtaattaaaaatcatatagtcttattcatctataaatgaatatttttgggcctatgtaattataatgaagtttatgagccaattgcaatgataacttatagtgaagggccaactaataaataaaaatgaatacagttcaagtcgagtatttctttattaatttcttgtctggttgatctatccattgttgaaagtgggttattgaagtcctgtgctgttattgcatctctatgcattttttccatcaagtccattaacacttgctttatatattttgatgctccaatgttgggtacatatatatttacagttgttatatacttgataaattgatgcctttaacattaaataatgagcttatttgtctcttgtgacagtttttgacttgaaatctattttatctgatgtaaatatagccactcctgctctcttttggctactgtttgcatggaatatcttccattctttaactttcagcccatgtgtgtccttaaatctaaaatagttcttataggtagaatatagttagatcttgtttcttttttaatatccattcagccaccctgtcttttgattggataatttaatccatttacgtttaagggtattgataggtaaagacttattcttgcccttttgtcattgttgcttggttattttgtaggtccttttttttccttcttgtgacttacttactgtaagttacttactgtagctatggttatttttgaccattttgacttttaaccttcatactagagatttggaagatttacatactgctactatagtaatggaatattctgcttttgactgtgtatttacttccaccagtgagttttatactttcatatattttcattttggtagttattatcctttcatttccagttgaagaactccattaagcatttcctatatgatggtctagtaatgatgacaccatgatcaatggggaacaactaaagacttctccactaagatccagcacaaggcagggatgcctgctgttaccacttctattcaatatagcgctggaattactagcaaaggcaatcagacaagaaaaataaatgaaaggcatttaaaacagaaagaaaaaagtaaaattatctctgtttgtagatgacatgattctatatgtagaaaaagccaaagattctacaaaaacctcattagaactaataaataaatttaataaagttgcaggttgcaaaatcaacatacaaaaattagcagcatttctatatgcaaataatgacttagctgaaaaagaaatcaagaaaaaaatctcacttacaattgttacaaaaaatacatagtaatgaatttaaccaaaaaggtaaaatatctgtacacagaaaactataaagcactgatgaaagaaattggctgactctgggtataccaccaataagttagccctgctccacaaggaacagtgaaaaaaaaaaaaagaaggaaagaattgaagaagacacaaataaatggaaatatgtcctatgttcatgggttataagaattaatattgttaaaatgtacatactagccaaagcaatatacatagtcaaagcaattgctatcaaaattccagtgacatttttaaagaaatagagaacacaatcctcaaatttttatgaagctgtagaaaaaacccaaatagacaaaaagcaatactgagaaagaacaaagttggaggcatcacacttcctgatttaaaattatattacaaatgtctagtaattaaaacggtatggtactggcataaaaaagaaacacggagcagtagaacagaacagagagcccagaaataaatccaaacatatacggtcaactaattttcaacaagggtgccaaaggccacaatgggaaattaatagtttttcaatatatggtgctgagaaaactggatttccacatgcaaaaggataaaattaggaccttattttccacccatacaaaaaaaaaagtcaactcaaaatggataaaatgcctgtgagacctgaaaccataaaacacgttgatgagaacatacaggaaaaaacaccttgatattggccttggcaatgactttttggatataacaccaaaagcttgagccataaaagcaaaaataaataaatagggttacatcacactaaaacgtttctgtacagcaagggaaacaatcaacaaaatgaaaaggcagcctgtagactgggaaatatatttgcaaaccacatatatgtaagaactcttacaactcaatagcagaaaataaataaccctattaaaaagtgagcaagaaacctgagcagaaatttctccaaataaaacataaaaataaccatcaggtgtatgaaaaggtgctcaaatcactaatcatcaggggagtgcaaattaaagtcattatgagatatcacctcacacctgttaggaagactattatcaaaaagactagatataataaatgttgatgagggtgtggagaaaagagaatcctggaataccgttggtgggagtgtagtttggagcagccattatggaaaacaatatggaggtttattaaaaaattaacaatagtactactgtgtgactcaatatccctctactgggtaaatacccaaaggtgatgaatttatcacctcctagagatatctgcacccccatgtttattgcagtattgttcacaataggcaagatatggaaacgacctaagtatccattgatggatgaattgataaagaaaatgtagtatgtatatgcaatggaatattattcaaccttaaaaaagaaagacagcctgccatttgccacagcatggatgaaccttaaagacattatgctaagtgaaataaaccagacacataaataatatattgcatgatctcacttatatgtagaatctttttaaaaagtcaaatatacaaagatagagaataaaacagtggtggggatgtggagtagggtgggaggaaatgagtacatgtaggtcaaaggatagaaaatagcacacatgtaggatgaatatttttagagatctaatgtatagatgaagactatagctaataatattgtactgacatatctcagagattttgttggtttggtaccagaccaccataatagagccaatgttgtaatagagtcaccaattttttggtttcccagggaacataaaagttatgttcacattatacttagtctattatgtgtgcaataacattatgtctagaaaaacaatgcatataccttaatttaaaaatattttattgttaaaatatgctaatgatcatctgagccttcagcaagttgtaatctttttgctggtggacagtcctgccttgatgttgacagatacagactgatcagattggtggttgctgaagggtggaatagagggggcaatttcttaaactaagatgacaatgaaatttactgcatcaattgactcttcctttcataaaatatttctcctatagcatgtgatgctgactgatagcattttagtcacagtagaacttctttcaaaattggagtcagtcctctgaaacccttgccactctgtctgatcaactgagtttatgaactagtataagtactttgttgtcatttcaacaatgttcatggcatcttcactaagagtagattctgtctcaagaaaccactttctttgctcatccgtaagtagcaacttctcacctgttggttttatagtgcgattgcagcaagtcatccacattttcaggctccacttctaattctaattgtcttgccgtttctacatctgcagttacttcctccactgaagtctgtagctctcaaagtcatccatgagggttggaatcaacttcttccaaactcctgttaatagtaatattttggctttctcacatctcacatgaatcacaagtgttctgaatggcatctagaattctgaatgttctccagaagatttcccatttactttctctagatcctttagatggatcagtatctatgacagctatagccttaccagtatatttcttgaataataagacttgaaagtcaaaattgctccttgatccatgggctgcagaatggatgttgtgttagccggcatgaaaacagcattcgtcttgtagatcttcattagagctcttgggtgaccagatgcattgtcaatgagcagtcatattttcaaatgaatctttttttctgagcagttggtctcaacagtaggcttaaaatattcagtaaagcatgctataaacagatgcactgtcatccaggctttgtccttccatttatagagcaaaggcagagtagatttagcataattcttaagattctaggactttgggaataatcaaggagtactggcttcaacttaaagtcaccagctgcattaggccctaacaagttagcctatcctttaaagttttgaagccagtttttgacttctctctatctatgaaagtcccagatggcatcttcttttaatagaaggctgtttcatctgcattaaaaatctgttgtctggtctagtcaccttcatcagttattttagcagatcttctggataacttgctgcagcttctacatcagtacttgtgtttcagcttgcatttttatgttgtggagatggttccttttcctaaactttataaaccaatctctgctagcttcaaacttttcttctgcagcttcctcccctctcttagcctttacagaattggagatagttagggccttgctctggatttggctttggcgtaagggaatgttgtgtctggtttgatcttctatccaggccactaaaactttctccttatcagcagtaggtctgtttcattttcttgtcattcatgtgttcgctggagtagcacttgtaacttcctttaagaacttttactgtgcattcacaacttggctagctgtttggtgcaagaggcctagcttttagcctattttagcttttgacatggcttcctcactaagcttaattatgtctaccttttgacttgaaatgagagatttgtgactcttccttttgcttgaacacttggaagccattttaaggttgctggttggcctaatttcgatattattgtgtctcagaaaacaggaaggccccaggagaggaagagggagttggggaatgatagatcagtggagtagttaaaacacacacaatatttattgattaagtttgccatcttatatgggtgtggtttgtagtggccccaaacaattacaacaataacatgaaagattactgatcacagatttccataacagatataataataatgaaaaaattagaaatactgtgagaattaccaaaatgagacatcaaatgatcacatgctgttagaaatatgacaccgatagacttgttcgacactgagttgccacaaaccttcaatttgtaaaaaacataatacctgccaagcacagtaaggtaaagcacaataaaatgaggattatgcctgtattgtaatacaaatttttgttaaataggtagattttagctgctttcatctcacacacaatcaaaaatatgtgagatgatagacatgttaatttgcttcactatagtgattcactatagtgattttactatctttatgtgttccataatgttacatgttaaatctcaagtatatacaataaaacttactaaaaaaagaagtgaagccatggattaagttcattatatagaaaaatcttcaaatagagccactatcacacccctaaactcacacaaaactacctaagtaaaattcaaaagatattttgtttggaacctgttggatattagttagcagttctcactgatgaatacctgtggtaatttttatttatttatttatttatttttctgagactgagtcttgctctgtcacccaggctggagagcagtggcgtgatctcggctcactgcaacctccgcctcctgggttcaagccattctccttcctcagcctcctgagtagcagggattacaggcgcccgccactgtgcccagctaatttttgtatttttagtagaaatgggatttcaccatgttggccaggctggtctcaaactcctgaccttgtgatctgcccaccttggcctctcaaagtgctgggattacaggcatgagccaccgtgccctgcctaactgtggaaatttttatgcatttattttattcatgtcattaactcaccaaataatgtgtctcacatttgaaaaaataaatctggctataaaatcagcccctttggggaccataatccctaagcataccatagtctgtattactcctttaattatgttgtaactctgtctctgttttgtcttaaatgttccagtttcctactatatgagtctttaacaattatttctgttttacaatcctttttcctgtagtttaacagcgaaatacttcataagacttgatgaaaagaactgagaaaatataaatagaccaaacaacaactttcatgtttagcacaagctttctactaattttagtactttgaggggaggttagttatctctagctctaaaatgtttatagcagagactacttgtacccagcgggagctgacctaaaaaccagcatcaaatgttctgtagtcaagtagatgaaccggagttcccagccctgaaagtgtgcaaaatcttttgtacagtaaagaaaagtgtttcttcattagctattccatgcatattggatgcatgcacgttagatattctatgcctaacaccacattttcacagcctatgatttctgggatgacttactgtaaatgtgcataatatgcttgaagaaagacattaaccaactttactttggctggtaaattaattaatttttttaaaagatgaccatagtcccagaaacacggtaaaagtttgttgtgaattgattgcctcataggtgacatagaaagccaacaaagtaaacacactttgaaatggttgattagcttaatatccagtttacatattgcatatcccaatgaaaattctatataatgaaacaattagtattgcttattacacaaagtgaattctgatgttgggggcagaattatctacttttgttaattttgctatgcttttctaaacttttttgggagaggagcaggaaataaagtttatcatgagttcatactctagtttattgctattcttactatatcatagactttttatttccccatgatacgaaaaacatagtaatttaatgtaataatttaaatttcaaaattttaggtagaaatagtgtaagaatttttaatttcatcagttaagttaaataaaatatgtaacagatatttgaatgcttctgtaattaaaaatggcccatattggtaagaagaaattacctttatattttgagtaccttttacctgttgacaatgcacttaataatcaatgaatatttattcacaatctacaagtctatgtatgtattttatgaattcagttttattaagaagtataatgaaagacatcggtgaaaatggtttgctgttttttaatgtagaaaaatttggaaaacatacagtaggaagaaaaagacccataaacacaccacttaaatccagttgctattattatttaaatgcattttcttttagtcttgtattcctttagacttttagctcaatttatatcaattgataaatttatataacatagtataatgatatggtttggctgtctctccacccaaatctcaccttgaattgtaataatccctacatgtcaagggcagagccaggtggaaataattgaataatgggagcagtttcccccatactgttctcatggtagtgtataaatctcatgagatctgatggctttataaatgggagttcccctgtacaagcgctcttgcctgccaccgtgtaagacgtgactttgctcctcatgtgccttcggccatgattgtgaggcctccccagccatgtagaactgtgagtcaattaaacctcttttctttataaattacccagtcttgggtatgtcttcattctttattagcagtgtgagaatagactaataaattatatataataacatataattataaaatacattatactttggttctatcaagagaattttcttaagaaaagaagataaagtagatttcttaattgacaattcttttagtcttggcacctcagtttcatttttatatattttgttatagttgtaaccatattcatattattcttcatttatttcttaattaacattataagttaggaattttttgcatgttacctcaaaagctgttttaattctttggacattaatattttacacatatttttacaattgccatagctattggacatatagggttttaaaaaaatctagggttatcattaataacactatagtgaatattacatgcagtagttctaatcttttgattctcagaagtgaaaatactgagtcaaaagcattgattattcttaagtgtaccatatatgaaaacaaaatagctgaaaagtaatgagcactcataaatgggtaaaggattataattgacaatttgagaaaatgatacagaaatgaatcatagagaaatgtaaccttttttctatctcttgaaggaaaaatccagtatggaaagaggataaaaaggaaaagaaataagaggtagatcaaagcagccctttaaaagcttggctttttttggtaccatcaagaactgtggtaatataacagttgttgatctcttctgtttacaaagtattacacaaattataagacaaaataaaaaccatacattgttccataacgcagagaggacctaccattttgatgcatttacttctgtgctttgtgtgcatgtatgtgtgtatgtttgggggtggggagatggggtacataaaatgagattatgctgtatgtatagtttgatatcctgcttttactattttatataaccttatataacctccatgtcactttgtaaaatttatgataccttgtggctgcataatatttcattatttattgacatttatttctaatttttggcaattataaatttcacttcagtgagcatttttataaataaatttggcacttaggcaattagaataaatgcctataattgggattactagtttgaagagaataccgtgtacagatttctgaaattcatctgtataaaaggaggtagagtttctatagctaaagtgttcctttggttattttttttatttcattttattttattttattttttgagatggagtctcactctgtcatccaggctggagtgcagtggcacaatctcagctcactgcaagctctgcctcccgggttcacgccattctcctgcctcagcctcccgagtagctaggactacaggcacccaccaccacgcccggctaatttttttgtatttttagtagagacggtgtttcaccgtgttagccaggatggtctcgatcttctgacctcgtgatccgcctgccttggcctccctttggttattatgatgctgtataaccctagaggctttctttggctaccaagtctctgatctcccttccttggccaaataaatggttattaggttgttaatttgctcatcagtgtcatgaactaaaaggaatttttggagggtccagaaacaaatgaattgcttaagattaattaactattcatgattgttgtttcatgctgatcacatgatcatgtggtggttttaatcacctcttcagtcatgtgcatgttttctctttgtaccctgaagtgcctcttaagcttgaaatcaagccctatgtttctctcagagcttcccaactacctaagtgagcaaagaatgtgtaatctcactcactcaacctctctatttctgtcttgtcactgtctttgtctctctctcatttctgtggttacacattttcttttctctctggttgtctgcctggcctgaagggtgatacaaggtctgttgcgggaagtcagggaccccaaacggagggaccggctgaagccatggcagaagaacgtggattgtgaagatttcatggacatttattagttccccaaattaatacttttataatttcttattcctgtctttactgcaatctctaagcataagttgtaaagatttcatggacacttatcacttccccattcaatacccttgtgatttcctatgcctgtctttaatctcttaatcctgtcagctgaggaggatgtatattgccttaggaccctgaaataattgcattaactgcacaaattgtacagcatatgtgtttgagcaatatgaaatgtgggcaccttgaaaaaagaacaggataacagcaattgttcagggaataagaaagataaccttaaactctgacctccggtgagcccggcggaacagagccatagttctcttctttcaaaagcaaatgggagaaatatcactgaattctttttctcagcatggaacatccctgagaaagagaatgcgcacctggcggtaggtctctaaactgccccccaccccccgccgggcgtggccgtctcttacggtcgagactgcagaggtgaaatagactccagtctcccatagcgctcccaggcttattaggaagaggaaattcccgcctagtaaattttggtcagaccggttgatctcaaaacgctgtctcctgataagatgttatcaatgacaatggtgtctgaaacttcattagcaattttaatttcacctcagtcctgtggtcctgtgatctcgccctgcctccacttgccttgtgatattctattaccttgtaaagtacttgatgtctgtgacccacacctattcgcacactccctccccttttgaaaatccctaataaaaacttgctggtttttgtggcttgtgggcatcatggaacctaccaacatgtgatgtctcccctggacgcccagctttaaaatttcttttgtactctgtccctttatttctcaagccagctgatgcttggggaaaatagaaaagaacctatgtgaatatcggggcagattccccgataaaggtcttcttcttttttttttcctgttagttctgattttaatctgcatgatgacagcagatagttgctcacctctgtggtttgagtgcagaaagaataaatcattaacagagtgcctctaggaagatgtttccctcctggatatattccccctgtctttttcactttaaaacttttcctttcacgtggaagttgaacaaagaatgcagttgactacacttcagaaaccaggggcttttatggaactgcctcggcagaatggccttttgggacctttaaccttagactctttctcgttctttttatttgggcaactaagtacttgatttcaaatgataaatggttgagttcaggccaccagtgggtagtgctctgaagtgaataggtgatttttgtgtgatttctagaatttttaaaagacgtctacatttgatgatagtatagcactttttatagaactgttcatgggataatacatttgagtctccatgttttactcaacctgggtccttcagctttgtaattgtggatggggagctcttgggctggactccgagaacctgtataaggttggctaggtagagagggaagggcattcttggggaactaagttgtggcaagttttaattggcttggggcacaatacatagttactgaataatgtgtatttaatatatgttggatcagccctagatttataaaggctgttacagcagatccttctgtattgcattttgttatctttaccagaaggaccagaggcaaggatgaaactaagaagtcacctttgctccttctggtcaaaataggaaaagttaaggtggcagaagataatgaaattatttgttaaaatgaggtgtttggcttctctgttggatccatttattcatgccactccagattttcatcaataactgaattcagggtgatgttactttacatattatatgaaagcattgtgtattgttatgtgtttatagatgtggttataccctcagctctaaattatgctagaaggtcaatactgtatatgaaactgaataacaagagtgattaaataagaacagtgttagatacttgaatatgtatcttatactgttttctagggaagggtgatgtatttggagacatcttctggaaggaaaccacccttgcccatgcatgtgcgaacgtccgggcactgacgtactgtgacctacacatcatcaagcgggaagccttgctcaaagtcctggacttttatacagcttttgcaaactccttctcaaggaatctcactcttacttgcaatctgaggaaacgggtatgttctctgggtctgctttttcttattagtgtccagagtattaattaattcagctctattagctgaagagtagagaagatattttgttttgcagcactaaattcccatcaatgtaaagtggcataattttccttctctttatttatattttgtttactttttaaggaaaaaaaccctatttctatgagtaaagatttgaatctttaccatttaagatacaaaatgaaaaacagacttgaagagaaacaagctgtgaactctattatgatgtagttagttcttggagtttataatactgccataaaatcaactccagtgtcttttacctttttatatggatttttttaaagctggtaaagttaatcaacctgggtgcctgttttacattctcagctctctttaggcacttctcatttcgtaatcaattcacaaagtttactctttcaaagaacgctatctcaaaaattaattagccgcattgacacatcctacaaatatggataagaatcctttattttacactgctgccgcacatttaaccttcactgccattttgtagccgatgagtgtgacacaaatttaatttgcatgaagaaatctcctagttctggtttctaggtcattgggcattgggtaaggcttttttattgccaagaatgaaatacatgtttggataactgcacttaagtgattttatctaaaatgatcgcctgtctgtggtgaagtattttgaaataacagtcattcctttctataacctgcttaaatgaaaccttctctgtagttaacagggagggaagaaattgagcaaagagataaattaatgtctatactgtagcaacatagaaatgaacataattaaatcaatgtaattcctacttagggttccaagaaaggatgagactagcaggagtagtgtttgtactggctgtatcacatttatttgatctatacttgaacatcattttcagttcatacgtttgttatcaaatagatggagcatccagaatctgtgagaaagaatgaatagctgtagagaacacacagacttaagcacagagtacgtatgctcaatagacctatagttagatgtgaatattatgtcaaacacaaatagtggaaagtgaaggcaatgatgaatgtgggaaagggaagctaaatattaactaaatgtggaagtttctcacttatgtgttagggagctcagagtccctttcagtattaagcaggaatgtctcctttggtctgtgctctgccttctgcaatgacaaatttcccttcaacaaggcaacctgtttggtagttgactcttgtagtgtggttggcccttgaataacacaggtttgaaccacgagggtccacttacatgccaattttttttgcccaaatgcagatgaaaaatacagtatttgtgttatttgaaacttgtgtataccaagagcccacttttcctgtatgtgggttccacagggcagacagcaggacttcggtatgtaaggatctgggtgtgtgaggggatcctggaaccagtccccctcgtataccgagggaagactgtagttttaagttcccttcaatctaaaatgtgcattttaaaatcttcccccatactgcaagattactgaaaactcctatccaacatccgtacattcctcaggacttgatgtttataatattcctgtgaaagaaaatgggcagttatttttccttcaaatcacatgagaatactcaggcccagagggattaatatcaaacaaccaagtgacacatttgcaatgcaaggggccaaggagggacaatggaaacagatcaccagtagaacatctgtcaccactttttctcttacacacacacacacacacacaaatacacatacacacatgcattcattggttgtgacagctgagtgcacactggtgtggactcagtcttctgataagaagacaagctagagacagaaaactgttgttggtttttcaacaggacccagaaacgctgtgcctgtctccatgggtgccaatttgctgagtaacaccaagcggctttcttccctcacaacctgtttcctgttataactggtgtcaatttttataattctagcctctctgctcttgatgcattgtctcagtaacttggcaaatagtaggaaaagggtgtcattcagtttcactttattttcagagaaacaatatactcatgaaaaagataagtggtgagaaaatattatctaatgggtagtaatactagctaccatctgagaacatgttgtatatagccaggcacttcaacatagtttacatataatatcttattaaatgtcaacgacccacaaacagagcagtatagtctccatttcacccatgaagacgttaagtttctaagactggaacagctagttccctaataacctaggagtcagggcctgcatttgaattcatctctatgattctaaaacctgtattttttagactaccatgttgttttagcttgtcaaagccactgacattttcttttccataatattccacagaaacactgtcaacaatttatagtttctcattcacttattcactttattccaattgatctattaatgaaaacattttgttcttattgctattattgtaaaaattattgcaatgaacattcattgtgaattctataaccaaaactatgtctttagtatgctattgatatctcatagctatcatagccattggttaagggtgtgttcctactaagtaagggagcaggttttgaatccaagttgtcagccatggcatggtacagttctggccacacatgtgtatccagtggctcagtggagaggtttgaatagtgtgtggctttccatggctgcaataaggaggaaagtgagccttctttagctgcttgccttcatctccattaaggaaaaataagatgcttactgtgcgaatatagctcttcctacccatccttaagcccctctatgtaaaaattctagagctataactagaattccatcaaattctacgaattgacgaataactagaattccatgaaacaactacggcatggaatggaaaatttttctgtcaaggaccagatagtaaacaattttggatttgtgggccaatctcaactactcaacttttccactgtagtatgaaagcagctgtcttagtcagcttggactgccataacaaaatatgatacattgggtgtcttaagcagcaggaatttatttctcacagttctggaggctgggaagtgtatgatcaaattactggccagtttggttccctggtgagggttcttttcctggcttgcaaatatccagcttctcactgtgttcccacataagagagacaagaaggggaggtagagagatgggaggtgggaaggaagccagctagctcattggtgtcttataagggcaccaagtcactcatgagggccccaacttttttttttttgagatggaaccttgctctgtcacccaggctggagtgcagtggtgcgatctcgactcactgcaacctccgcctcctgggttcaagtgattctcctgccttagcctacagagtagcaggaattacaggtgcatgccaccacgcccagctaatttttgtattttcagtagagacagggtttcaccatgttggtcaggctggtctcgaactcgtgacctcgtgatctacccacctcagcctcccaaagtgctgggattacaggtgtgagccaccgcgctggccccaactttattacctcttctaaacctaattacctccaaaggctccatctccaaataccatcacattggggataagagcttcaacagatggattttgagggggtaaaacttagtcaatagcaaagctgtagataatacataaagaaatgaggaagattgtatttcaattactttacttacaatcaggtgactgcccaggggccttaagtgtgttaattgttgaaaaaagaggactggaagaagttaaatggggacaacagtgggcatatgaatagaatcgccccacctttattagaaagcaaatctattctacttgctgcctattcagagggttatgagatggaaaatgccataaatattaataagaagtagctacacaaagcaggcagatagcatgaaagagtaaggcaggatttatagttactgtggaaatggagagttcatttcatctgtgaacgagacagctgttactcactctggtaggacattgccttgtggggatgctgggctagtgttgcttagtcctcatatttttttttctccaagaggccagaagcacatttttatgggaaaacacatttgtttggtaattgatttgatttgtttttaaaattctgtggtcaaacaaaataagtttgcttgctattggttcaacagctcatgatctaaatggaatcagttaatgaactcctggtctcatggtgctagaaacctgagatttttacctggggcctggacattttgatgaaaacaaattttattttatctattttctaactgacatttagcttttcctttaattggaaaggttgctagacaactacagtgttattagaagtaccaaaagcaattatattaatggatattttcatatatcatatgtgccaaagatatcttgaaatgccatttatgctcattactatttaacaattatgatagttattagacttgctgctagacagaagtacatagattactgtaaattatttgaaaatattttgataggatttcaatatatgtttcctttgcaatcctacatattttattttgtgcatttagagcaattcttttaaggagaggtccacaggctctgccagactactggagattaagatcccatgtgtgagagtcagaagctaaactgaattgagcagaaggacctgctggggtttttttttcaataataagaacacaattctgtagtttccaataagtttaaacatattcagaaaagggatgagagagaagcagaggaaagttgactcatttgcttactttatgtatgtatttatttaaccaattcaagatgctatttcctggaatgacaaaatggtattcattaaattgatgaccagctcttaggtatacatcaaagaaagtaagcaacacaccttctttgacacacacataaaaaggtaacacaggtgacacctacattttaaaaacttcttattagacttttaaagttaatattacagttcctcccattttacctatttgttgcacaatgatttttaccatttgtgtaaaaaagagttaacctggcaggtatgactattgtcctttgaaagacttgcttataaagctggctcttgtgaacttgatttcgggggactctcaccactaactgatgagtagctctctgtgccttaattgtctgttctaacaaggtgggttgatgctgaatatcaactttccttcccgaagtgtggaattttggcatatgtcaggaaaagatgcctttgtgaccatctccagtacaaaaccagaagcaccaagtccttcatgaacttccctggttgacagcatttctcgtgtgttgtcatactcttgtttgtgcctggcttcccccagactttgcccatgccccttttccctttgctaaattttctttgtatcttatgctgcaatagtcataaccatgaatatgatgatatgcagaattctgtgaatctgcctagtggattgtctgaccttggtatggacttgagggtaaccagtgctccatatataaaggttggtaggaaatctgtatcctcaaaggtcctcaaatcagcagatatattggtaatttcattgtaacctttttttccataaaagatactgaaacctacagacagtatgttttatgagtaaaagagaatgaaccatttaaaaataagtgttatatttgtccataaggcagtcaagcgaatttcatttccttgaaacttaaaatatatgttacatgaatactgctggctacaataagcatgcctgagattttaaattatttctgaatattttcttcactttcaagatagcaagaacatatttttctccagattgactatttaaataggataagagaggaattttatttgctgtttctatacgtcttctcatgagacactttgttgaagtgtggcacagaaagtattggctggctcaccatatagccatgcatccatccagcccataacacataacatggggttgtggacataaaagaccaggtgcctgctttccaggaggctccagtctagtgagagatcatgagtcagataagtgctacgagagggttattctcagtacacaggcggcataaaggagatgaattcagtttgtccaaggggaggaaacagggaaggattccaggaggtgacaaggacacaggagttaggatttcatttcaaatagagaaataatctagaacaaggatgcgtcttgtatatcaccaatttcattttattttctttagagatgagaaaaattcagacctaagaaattaagtgattgcctaagttcacttagctagttagtggtagagctgagactggaatctagtccttggaagctcatgctggcagtgtttctactatttaacctagaataaaagcatttcgaagaagattgtcagtaaaatccaatacttgattgtgttcatttttaatagggaaggataatatgtggcatcaatttgcatgtgattcatagattgattttagtttttcatactgtggttcaggataaaactaatagtgaagccaaaacaaaacaagcaataagcagtgttcagagtcagtggacaggactctcaatctgggcatgaaccaatacgtctagtgtggccacagcatatctgtcacctgcattgtaaaatatctcattttagtgaaagcatttaactttcatatgagtattgtttaagaagtgttactgaatttagtaatattgtcttgctgataatactgcattctgatatactctctgttaacatgtcaatactgctgtactggttagtataaatacatagaaagataaaaattctcacattaaaaaaactgctacttttttttttttttttttttcagacaaagtctcactctgtgtcccaggctggagtgcagtggcacgatcttggctcactgcaacctccacctcccaggttcaagcaattctcctgcctcagcctcctgagtagctgggattacaggtgcacgacaccacgcctggctaatttttgtatttttagtagagacagggtttcaccatgttggccaggctggtcccaaactcgacctcaggtgatctgcccatctcagcttcttgaagtactgggattacaggcatgagccacagggcccgcctgctactttttcacttttgtatcttaagttatttttaaaaagatattaatacttttatattagaagttacaaaaaatattgacaagcttaccaccaaatgtgtactaaattatgtatactaaaaatattagttaatcaaaaaaaaaggaagggaaggagaaaaagaaaatacaaaattgaatattttcatatagaactggaaaaatctgagacttgtttggtagcaggtagagaatgtgttttttttgttgttgttgttagggctgaaaactaacagaagattactatgcagccaattccaaaaatgcaaaagaagaatgtaaactgaattttgaaaaagaaaaaaataactaagattgaaccatgttaatacaggctaaaattatataatcaagcgggtttcccttttaaataccatgtctatgttatatcggtgggtataaaccctcttgtggttccagattgagtgatcatggccagagaagtgttgtcttttcactccatgactctgcttattttgtcactggtgtaattaaagtttctaagcaaatggctctagagttctaatacctttactattgtcatggagtggggcccattggatgttgataaaaatgatgtcaaactgacatcctttagtagtggtctcaaagaattgcttccattgtggcttcagaggcttatcttcctttagctccatagtttctagtttagagtctttttgtttgtttttgaggcagagtctcgctctgtcacccaggctggagtgcagtggcacgatctcggctcactgcaagctctgcctcccgggttcacgccattctcctgcctcagcctcccgagtagctgggactacaggcgcctgccaccatgcccggctaattttttgttttgtaatagagacggggtttcaccatgttagccaggatagtcttgatctcctgaccttgtgatctgcccgcctcggcctcccaaagtgctgggattacaggtgtgagccaccgcgcctggcctagactcatttttattaaacatctctataccacttagttcaatgcacaggttagtctggtaccccttgccaatatttctttaacccttgtattagtctgcttggcttactatcacaaaataccatagactgagtagtttcaacaacggaaatttattttctcacagttctggaggttagaagtccaaaatcaaggtgcagtagggatgttgtctggggacgtttctctccttgggttgccactggccaccttctcactgtgtgctcacatggcatccctgcagtgcctgtgtgtgagagagtgagagagctctcgagtctcttgttataaagacacaagtcctattggatcagagcctcatcattatgacctcacgtaaccttgattactttctcagaagccttgtctccaaatacagccatactagaggttaaggcttccccatatgaatttgcgggtgggagacataaacattcagtctataacaaccaagttttatattttaagttaaatgtgaagaaatgactttgaaaatatgttaaaatcaaaacttacagctggagtgtaacattactggggatggatgtgcagcagcagcagcagcaacaacattcagtgctgatttttataacttctgggcaatgtataattatcaataccagcaaggttttcttgctgccctacagtgatttaagaaggattgctatgtaaacttagaaaaaagtccccaggcatgatcaatccgaattgtaaaatggaaaaacagaacatagaggtacatgtagattccatttaaccctaaaaagccactgtccttttctacagatggcactgttcttgagtagagatcaactgaagccagctggcaatgttatggagaagcgtagtagcaatcctgtattttgatgttccagtggtaagaaatagtggtttgggttcactctggcattagcacaggctcagaactcaataatgcttttctttccagaaaacgttcatattatggtgaatccagcagcacaaaatgtcatttttttctgtgatcaatgaagcttctcagtagcaatgatcttttgtaaatgaaaaacatactggaattggatatcaaacaggcataaagtatttgcttggtgtacatgtgtcgcagattgcatctatttcagtagcaatacgagcatcttcgaagaaatggtctaggagtgacaatgggtgttccaactacttttttttcttttcttcacccaccctccccacaatggtatattagctaaacaaaatagtagagcccgtttgttccacgaatccatcaattcttgatgctgtggaaaagacattactaaaacattgtccacacttgcaacaaaagataatatagtttccacaaaaccctcaaatagtacgtagtatctatgtttacttctctcataacactgattatggtactttggtttcttatttacatttctatttttcaactaaacaatgagctccatacagtaggtattttctgtaatactttattgtcaatggccagaatagagtctgctatataattaaatgaatgaatgaaacgtgaatctgtcacgctgcccagcagtttttatcatcactgaccagaataatcactgttatctaaaaacacacaatatctttgataactttggcaataagccctatgtaataggattatgaaaattaccattattaattggtgttaaatcacgattagagttaactcccagctgctgtttctaaccatttgtgcctgcaaattctgcacagtcctgcagcaccagcttgtctagtgcattcagagtagtacagcaattttgatatcactgtggagtgaattgagatcacccgatgccagtggctgtgattgtcagagtagtgccttattcccattgtgaaggactttgaagagaaaacgattgctctgaaaaccctgcatgccacatttgaatctgagcagagtgtagatataactctcattacctcaattgatcatcaggactgcaaattcactccaacctactggccctgctggcagtagctctgcttacatgttatggtttgtagaaatttcacttccaaagtgatgctactcatcacttcacagtttacacgccacaggcgtgatggcgtttgagcttgaaatcaacactgtaagacaagtgagttaagggaggtaaggtgcttcgctcatggccatacaggtgataattgttctgagcctgcagcctcagtttttcaactccaagctggctccaattccactgatgggggtagaaagaggcagaccttcaacaattcctgaagtttgtcatgtgcatttagatgaagcagaggcctaattatggagtcttttaagcccttaagctgcttctatttagggctctctgttggtctgcttccagacggaataaaaacttttccacatttagtcaccaggacagaggttcacagataccttgctcctgaatatgcctccaaagcagttattcaaggacagtttcacaagtttcaaagttggggctggattcagtaatttaccaacattttgaaccataggtaatactgtctgttctttgccagctcttctttttaaaaccagagtttatttttattgcaagaaaatacatgttttaatagtaaacaagaagaaaataaataagcctttaatagatagaaaagtatttaaccaacataatgtaaaaagatagacattttacaaattatttttcttgcaaatgtctattcaacaatctatttgagacatttgtttttattttaggtctgagtcctgcctcaccataatgcatctctagaggcatcttagctggacgctagactgtttgtttctaaaatgtctactacttatgaattctcagccattaatatttgatatgattaataaatgatgtgctctatcacatcattttcatttaaaggaaaatactccttttgaattagaaagcaagggtttgtattaatgttaagacttaaatgtgtgtattattttcttccttaatgccttttggcattgatttaaacttaggatacatgcaaattttcttatcctaactacttaggccttgttttactttttctttgtttttaatttttttataatttgtataaatttaaggggttcgagtgcagttttgttatatgagtatatggcttagtggtaaagtctgggtttttagtgtaaccatgacctgagtaatatacattgtgatcgttaagtaatttctcatccctcacccctctcccaccctggcaccctcccaagtctctaatgtctatcatgccacactctaggttcatgtacacacattacttagctacgagttataagtgagaacttgtggtatttgactttctgtttctgcgttgtttcacttaagataatggcctccagttccatctatgttgcagcaaaagacattattttattgtttataatggctgaatggtattccattgtgtgtatacatatcacattttgtttatcttattgacttttattttaggttcgggggtacatgtacaggtttgctacatgggaaaattgcatgcaatggggctttggtatacaggttattttgtcacccaggtaataagcatagtaaatgacagctagttttacaaacctcatcctccaccctccagtaggttctggtgtctattgttcccttcttattgtccgcgtgtactcagtgtttagttcctacttataagtgaaaacatacagtatttgattttctgtttctgcgttaattcacttagggcaatagcctcctgctgtatctgcattactgcaaagaacatgattttgttctttttatggctgtgtagtattccagtgtgtatatataccccattttccttatctagtctaccattgataagcatttaggttgatttcatgtctttactattgtgagtagtgttgcagtgaaaatatgcatgtgtgtgtctttatggtagaatgatttctattcctttggatatatagttagtaatgggattgctgggtcaaatggtagttctgttttaagttttttgacagatctccaagctgctttccacagtaggtgaactaatttaaattcccaccagcaacatctatgtgctcccttttctctgcatcctcaacagaatctgttgttttttgactttttaagaatagccattccaactggtgtgagatggtatctcattgtagttttgatgtgcatttctctaatgactattgatgttgagaatttttccatatgcttgttggctgcatgtatgtcttcttttgaaaagtatctgttcatgtcctttgctcatttaaaaaatatttttatgtttttaattttttgtgggtacatagtagatgtatgtatttatggggtacatgagatgttttgatataggcatgcaatgtgaaataatcatatcatggagaatggggtatccatcccctcaagtattcatcctttgtgttgcaaacaatccagttacactcttttagttattttaaagtggacaattaagttattattgactatagtcaccttgtgctatcaaatactaggtcttatttctttctacttttttgtacccattaaccatccccaagtaccccgacccaggccccaccacccatcccagtttctgttcaccatccttctactccctataattatgagttcaattattttgatttttttagaccccacaaataagtgagaatatgtgaagtttgtctttctgtgcctggcttgcttcatttaacataatgatctccaattccaaccatggttttgcaaatgacaggatctcattctttatcatggatgaatagttctcaggtgtgcatacataccacgttttctttatgcattcatctactgatgaacgcttagggtgcttccaattcttagctattgtaaacagtgctgcaaaaaacataggagtgcaaacatctctttgatatactgatttccttccttttgggtatatacccagcagtgggattgctggatgatatggtagctctgtttttagttttttgaggaacctacaaacttgttatacatagtggttgtactaatttacattctcacccacagtgcacaagatgtcccgtttttccacatccttgtcagcatttgctattgcttgtcttttggatataagccattttaactgaggtgataactcattatagtttttatttgctcaaagtgatgttgagcacattttcatatgcctgatttccattcgtctgtcttattttgaaaaatgtcttttcaaatcttttgcccatttttgattggattattagatatttcctatagagttgtttgagctccttatatattctggttattaattccatgacagatgggtagtttgcaaatattttctcccattctgtgagttatctcttcactttgtcgattgtatcctttgctgtgcagaagctttttgacttgatgtgatcccgtttgttcatttttgcttttgttgtctgtgcttgtggggtattgctcaagaaatttttgcccagaccaatgccctggagattttactcagtattttcttgtagtattttcatagtttgaggtcttaaattttctttgcccactttttaatggggttgtttgttttttgcttgttaatttgtgtaagttccttttagattctggatattagtctttcatcaggttcacaggttttaaaacttttctctcattatgtacgttgtctgtttactctgttgatagtttcttgttgtgctgagactctttagtttaattaggtcccatttgtcaatttttgtttttattgcaattgctttcagagtcttcatcatgaaatctttgccaggacctatgtccagaatggtgtttcctaagttttcatctagggatttatagttttagggtttacatttcattctttaatctgcctgagttgatttttgcacatgataaaaggcgagggtcaagttttagtcttctgcatatggctagcgagttatcttagcactatttatggaatagggagtccttttcctactgcttgtttttgtcagctttctcaaagttcagatggttgtaggtgtgtggatttataactgggttatctaacttgttccattggtctatgtgtccatttttgtaccagtacaatgctgctttgattactgtagccttgtagtatagtttgaagtcaggtagtgcgattcctccagccttgttctttttgcttagaattattttggctatttagcctctttttttggttccatataaattttagaatagttttttctaattctgtgaaaaatatcattggaagtttgatggaaatagcattgaatctataaataccattggacattatagttattttaacaatattgatttttcctatccgtgagtgtagaatgtttttccatttgtttgtatcatttctgatttctttcaacagtgttttgtaatacttgctgttgaggtctttcacctccctggttagctgtgtttttgggtactttatttttgtgtgtgtgcctattgtcagtgggattgcattcttgatttggctgtcaggttggacattgttggtatatagaaatgctactgatttttttatatcgattctgtatcccaaaactttgctgaagtggttgatcagttttaggagactttgggcagatactgtacggtttctaagtataaaatcatataatctaggaagagatagtttgacttcctctccctgtttggatgccttttacttctttctcttgcctgattgccctggctagcacttccagtgctgtggtgaataggagtggtgagagtaggcatccttgtcttgttctggttctcaagccaaatgcttccccattttgcctagtcagtatgactttggctgtgggtttgtcataagtggctcttattattttggggtattttcctttaatgtctagtttgttgagggtttttaacatgaaaatatgtttaattttaccaaaagccttttctgtatctattgagatggtcatgtagtttttatttttagttctgcttatgtaatgaatcacatttattgatttgcatgtgtttaaccagtcttgcatcccaggaatgaaggcttgattgtgatggattagctttttgatgtgctgctggttttggtttgctagtattttgttgaggattattgcatctctgttcatcaggaatgttggcctgcagttttcattatttgtactgtttctgccaggttttggtatcagaatgatgctagcctcatagaatgagttagggaggagttcctccccctcatttttttggaatagtattggtaccagcttttctttatatgtctggtagaatttgggtatgaatctgtcttgtccagtgctggttctggttggtgggctttttattacttattcaattttgaaacttgttattggtctgttcagtgtttcaatttattcctggtttaattttgggaggttgcatgtttctaggaatttatcaatttcttctaaattttctagtttgtatgcatgaaagtgtttgtaatagcctatgagggttttttatattactgtggggtcaatggtaatgtctcctttgttatttctgatgtgtttatttggagcttcccctcacttttttttgttaggatagctagagatctgttagttttatttattctttcaaaggaaaaacttttggtttgttgatctttcatgctttttcacgtttcaattttgttcagttcagctctgattttggttatttcttttcttctgctagatttgcagttggtttgttcttgtttttctagttcctctaggtgtgatattacattgttaatttgagatctttctaccttctgatgtgggcatctagcactatggtcttttcttttaacactgccttaggcgtgagattcgggtatattgtctctttttttttgttactttcaaagaatttcttgatttttgccttaatttcattgtttacccagaagttattcaggagcaggttgtttaatttccatgtaattgtatgatttttagaaagcatcttagtattaatttctatttttattgtgctgtggtctggaagtgtggttgatatgttttcagtttttttgaatttgttgagaattgtttcatggccaagtgtgtggtcagttttagagtatgtgttatgtgcagatgaggagaattgtatattctattgttgttgggtagagtgttctgcagatgccttttaggtccattggatcaagtgttgaatttaggtcctaaatatctgtgttagttttccacctcaattatctgtctaataccatcagtggggtgttgaagtctcccattattatagggtggttatctaagtctctttgcactgctgtaagaacttgttctatgaatttgagtgctttagtgttgggtatgtgtatatttaggatagttatgtcttcttgttgatttgaagcttttataattatgtaatgcccttctttttctttttcattatttttgatttaaagtctgtttttttttttgaaattagaatagccacctctgtgtttgtttgtttgtttgttttccatttgcttgttagatttttctccatccctttactttgagcctgtggatgtcattgcatgtgaaatgggtctcttgaagacagcatactgtgggtggggtgacgatgggaaggtttgtgcatatgcatgccattgatagcatggtggtgaggtttgcacatgcatgcaccaacaaagtggtggggtgacgttgtggtggagtgtacattggcaaagctgtgtggagaggctgctgctgggtgcctgttggtgagggcttgtctgctgaaactctccattggttaagcagggtctactggtgaaggagctctggcagcagttgctgggaaatggcccatctgggcattcaaggctgtgctgcaagtgggcatgggcttgcagggaccacacgggaggctagaagacagggttcactcagatcagactgcccttgttccatgggcaagacagacttgctctgtccaggtgtgacagtcagcaaagaccaaagccaccaagaagagtatggagagccttggggaacgggtgtccccagccattctctgactttcccaagccaaactctctgggctctgctcaggctagtgttctgtccctgccacctctccaagcagcaatctctgtcagctgaatatccatgggttgtgcagtcttctgaagctaggattctggaggtccatggcaagaatggtccactccacacctgtttaactcacctcttccccaggagctgctgggggccaagaatgagtactggtgcttggcagtcccatgcaagatttccagcttgctctcccttcaccccagggtctgcatcctccctccatccattctcaatgccatccttcgaaaggtcccctcacagtgtgccagtcttcttgatgctctagtatgttggtgagagatgcttttcttggctgcatctagtctaccattttggctcttcctataccacattttatggctcgttttttcttctgtcttctagaataaaagtaaataatttttctctgcagttgaatatataatataatgatgtgcgatattaagtttgaattttttatagacttgtattacaatgtatttttagccagagttcttttgagagttcttccctccccaacccccaaggcaacatctaaatttgatcatacagtttgtcattttagggatttcttcccttcactttttgaattgaatctattgtctcagctttttctgttttctgaggtgactgaaaaaatatagaagctcaacagacatgtatttgaaaagcttccatgctgattctgatctgtagctttgtagcacattacaatggaccataatccttttttttttttttttgagagagtgagtctcattctgtcacccaggttgaagtgcagtggcgtgatcttggctcattgcaacctccgcctcccaggttcaagtgattctcctgcctcagcctccagagtagctgggattacaagcgcccgccaccacacccagctaatttttgtatttttagtagagacggggtttctccacattggccaggctggtcttgaactcctgacctcaggtgatctgccggccttggcctcccaaagggctgggattacaggtgtgagccaccctgcccggccgaccgtaatcttttgaggagcatttggttattcaaaggagggatttcaaggtgtttatggtgaattcaggctgtgaaaaaaataaaataaatgttgtaataatacatatgactgtctatatgatagaaaggactttaaagcattatatacattttgcaaatgagaaaatagctactctgtggttagactgaattcttaatacttaactgttctcaccaaaataacatctgccttgctgcaatgtcttttttattccccagctgggaggtgcatttcacagattttgccttccagtcaggtgatctttttctaaaggaatcaaatgaagcaattctactgagtagccagagacactcagatgacccagcaaggctatagtaatttctcttggaaaaagtcattcattttctgtctcttctctctgaatcaggttgtacttgattcatccaacacttttagaagttgacatttgatttcactcgggtatgttctgtgttcacacttttgtcctctagagagtaatgtcatctgtagaagttcagagacacagtcctttaggaaactcgcaatctggaacggaagctgcaagtaaaagctaaaattgctaattctgcacataagaagaggccgatttcccctaatgatagcacacagaggtaatacagagaactggaccctgatcaggaatttgcttccttttttaactggtacctcggtgaccgtgttaggtatgattatggactgtattataacttagagcattacatgggtaatatgtaacacgggtcctttgaaagttagtttcccatgataggaagttatgtactcattctcgtgtgaaaaaagagtgtttcctagtgctcagaattcagaaactaggatgtcaaatgacctagttggccattgtagagtgtgatagtacacagcagagagtctcctgtgccagcaaaggtgagcaggagaaatcagatccagcctcctggatttgcaactccacaaaatgagactgactggcagcttttaaatagcaacatgtttgtacctgagagtcaccaagtggcttgttattgaaatcacactctgggaagactccctgtaggctgttgggagtggggatgcaggtggggagaaaagaaaagtgcctgacatgggcctatccccgccgttcaggtgaagctggcttcttcaaagtgtttgtaaaaaaagtcacaaaatggatgtttgctctggtgaaaaaactatgaaagtagatttggatttggtaattttgcaaagctgaaaaatctctgttgttgggttcctgagtcattctactcagcttgctcccttaaagggctcttttaaattttgaaccagcaattttatggaggttggtaacagtggtgatgatcagataatattgaaagagagagagaaagaaaggactgtaaaaattcaaaaattcaatcaggacaagtttgtcagcagaaaagacttaaacaaatgtaattattaaaaaatataccctacgcctggagggtaaaccagctttatgatatcaaatggaatataaaggatttgaattttcagcttttgagcaaatgttataaaacaaatgtgccaatatccttctgtaagcacaggcacctcagtattttccataatcaaatagccatgccccagaaataaattcataattgatgccacaggatttcaaattatctaagcattctctcattttcttaaaggctcttcagaaaaaatatgcctaatttagaaaactgctactttagtctggatttcagacagtgggactattcaatcctcaggtgtgcttcagcttgtcaaaaacagctgactaattttgatgaaagaagaccagagatagatttaatatcttaccaaaataagtcaaactaatacaagtgaccaggactataataaagacaaaacatagccatccatatagtaacaaaagtcattgttttaaatgaggatcaagagcaaaggtattcctctattgagttataaagacttttgttctcagaactaaaaatttgagatcatgtctttgaaatacaggacaataaaatcaagatttaaacaaatggaagagaacttgggaaaagcatttattataaagaaaaacatctgtgtcccttggattgctagcatataaaataaactgaacatcttatcctatgtctagctccctcctcaagcagtgtcttccaccctacaccctctgttatcctcctcatgtgttccagctccacatgactctcctttttccatactaacctacaaccaattgctgtaacatttggttggtatttactgtatgttgctttgtagggtcatgttgtgctgaacagatgacatatccccatgcactgacagttaccttcttaaagagacatctattaccccatatatccaactgctctttctacgccagcacttcagtgactttttctgattaaatgcataatgatattacagagttcttaatttaaagcaatgtgtgctgcttccctttctggtggtagaaattgatacccatgggaagtaagtactgagagaagagtagcagaaaagagggaaaagaggaatttgatttattttttaaaattctacaaatcaccggggtaattttggatggttctttttttaaaagaattttatttttaacttcagtgggtatatagtaggtatatgtattatggggtttctgggatattttggtacaggcatacaatgtataataatcacatcagggtaagtggggtatctatctcctcaagcatttatcctttatattataagcaatccaatcatacttttagatattttaaaatgtacaattaaattactactgactatagtcaccctgttgtgccatcaaatactaggtcatattaactatttgtaactttttttttttttttttgagatggagtctcgctctgtcaccaagctggagtgcagtggcccaatcttggcttactgcaacctctgtctcccaggttcaagcaattctactgcctcagcctcctgagtagctgggattacaggtgcatgccaccacacccagctaattttgtatttttagtagaaagggggttttgccatgttggccaggctggtctcgaactcctgacctcaggtgatccacccaccgtagccttccgaagtgctgggattacagatgtgagccaccaccctcggctgtaactatttttttgtaaccattaaccatcttcacttttcctcccatccacccactacccattccagcctctggtaacatcattctactctctatctccatgagttcagttgttttaactttcagctcccacaaataagtgagaacatcttgtctttctatgactggcttatttcacgtaacataatgagttcctcttctatccatgttgttgcaaatgtctggatctcattcttttggtttttttttttttggctgaatagtactacattgtgtgtatatgccacattttctttatctatattcagctgttgatggacacttaggttgcttccaaaacttggctattgtgaacagtgctgcaacaaacatgggagtgcagatatctcttcgatatactgatttcttttcttttgggtatatacccagcagtgggggtgctagatcatatggtagttctatttttagttttttgaggagcctccaaactgttctccatagtgctgtactaatttacattccgaccaacagtatacaagggttcccttctctccacaccctcaccagtgtttgttattgcctgtgttttggataaaagccattttaaatggggtgataggatattgcattgtagctttgcattgtagcattgcatttctctggttgatcagcttttaatacacctatttgccatttgtgtgtcttcttttgagaaatgtctactcagatcttttgcccatttttttaaatcaaattattagactttttcctatggggttatttgagctccttatatattctggttattaatcccttgttagatgtgtaatttgcaaatattttctccaattctgtgggttttctcttcactttgtttattgtttcctttgctgtgaagaagctttttaacgtgatctatttgtccagttttgctttggttgcctgtgcttatggagtattactgaagaaatctgcccagtccaaggttctggagaatttccacaatgttttctttcagtacattcataagttaaggacatagatttaagtctttaatccattttgttttaatttttagatatggtgaaagataggggtctagtttcattcttttggatatggatatccagttttcccagcacaatttattgaagagactgtcttttcctcattgtatgttcttggcatctttgtaacaaatgagctcactgtagatgtatggatgtgttactgaattctctattctgttccattggtttctgtgtttgcttttatcccagtaccatgctgttttagttatagtagctctgttgtataatttgaagtcagttaatatgatttctacagttttcttccttttgcttaggacagctgtggcttttctgggtcttttgtggttccatatgaattttaggatttttttttctatttctttgaagaatgttattggtattttgttaggcattgtgttgaatccatagatggctttcagtagtatggacattttaacaatattgattcttccaatctatgaacatggaatatctttccacttttctctgtcctctgtagtttctttcactgatgtattatagtcttcatcatagtgatcttattattctctacttaattcttaggtattttattttatttgtagttatcataaataggattactttcttaatttctttttcagattgtttgccgttggcatataaaaatgctactgatttttacatgttgattttgtatcttagaactttactgaatgtgtttttcagttctaatagttttttggtggagtctaggttttgttttttttttccttagaggaaaggctttcagtttttccccatttggtatagtactagctgtgggtctataatatatggtttttattatgttgacatgtattccttctatgcccaattttttgagggttgttgtcatgaagggatgttgaattttatccaatgcattttcagcatcaattgaaatgatcatgtaattttttttccttcattgtgttggtatgatttatcacactgattgatttgcaaatgttgaaccatcctcagatccctgggataaatcccacttggtcatgatgaatggacttttaaatgtgttgttgaattattcttgctagtattttgttgaaggtttttacatcagtgttcatcagagatactgtcctgtagtttgctcgcttgcttccttccttcctttttcttttttcgatgcatctttgtttggttttggtatcagagtaataatattgtgctcatagaatgagtttggaaggattccttctgcctctatttttaagaatagtttaaataggattggtattagttctttaaatgtttaataaaattcaactgtgaagccattgtgtcccagctgttttttgctgggagactttttagttactgcttctaattacttcttgttggtctatcaagttttggatttctttatggtttaatgtatttgcaggtcgtatgtgtctagacatttatctatttcttctaggttttccaatctattggtatgtagttgttctcagtagcctctaatgattctttgaatttctgctgtattggttatactttatcctttttcatctctgattttatttatttgggtgttctctcttttttatatttgtcaattttgtttatcatcataaatagccaactttttatttcattgatttgttgaattgttttgtttcaattttatttatttctgctgtgatgtttattattcttttcatccactaaattttggttttgttttctcttgcttttctagttcttcagtatgcatcattaggttgtttatgggaagcttgccttcttttttgatgtaggcacttataaaccttctttgtctctttatatagtttttgtcttgaagtctattttgtgtaagtatagctatttctattttattttattttattttattttactttattttatttttagacagagacttgctttgtcacccaggctggagcgcagtggagcaatttcagctcactgcaacctctgtctcctgggttcaagcaattttcccaccttggcctcccaagcagctggtactaaagccacacacccccatgcttgactatttttttttgtatttttagtagagatgggattttgcatgttgactgggctggtcgtgaactcctgaccataagtgatctgcccacctcagcctcccaaagtgctaggattataggcatgagccagcattcctggctctattttttttattttccatttgtatgaaataccattttctatcccttatttttagtctgtgtgtgctttataggtgaaatatgtttcttataggcaacagatcattggatcttgtttttttttttaatcatcccttcagccactctacgtcttctgactgatgagtttattccatgtacatttaatgttgtattgataagtaaggacttacttctgccattttgttatgtgttttctggtttgtcttccttctttacttccttcctgtctttcttttagtataggtgatttttttctgatgttatgttttaatttcttgctttttatttgttttgtatctgctgaatgtttttagatttgaggttaccatgaagcttgcgaataatatattataaccaattattttaagctgatgacaaattaatactgattgcaaacaaacagataagccaaagagaactaataaaaactctatattttaactgcatctctgtgctttttaactttttgttgtttctattttatatattattgtactgtctatgtcttgaaaagttgttgtagctttttagaatgtttcatgctttcatctttctatttaagatatgagtagtttacacagcacaattgcaatgttattatattctatatttttctgtgtacttactattactagtaagttttgtaccttcagatgatttcttattgctcattaatgtcctattctttcagattgaagaactacctttagcatttcttgtaggacagatatggtatttatgaaaaccctcagcttcccttgtctaggaaagtctttatctttcctgtatgtttgaaggatatctttgccagataactattctagggtaaaagggtttttttctttagtactttgaatatattatgccactctctcctggcctgtaagatttacactgaaaagtctgctgccatatgtattggagctccactgtatgttatttgtttcttttctcctcctgcttttaggaacctttctttacccttggcctgtgggagtttgattattaaatgcattgaggtagttttctttgggttaaatctgctttgtgttctataaccttcttgtacttgaatattggtatctttgtctatgtttggaagttctctgttattatccctttaaattttctattcctctgtctctctaccttctctttaagaccagtaactcttagatttgccgttttgaggctattttccagaactttagtcatgttttcttcttttttcttcttttttctcttctgtctattttcaaatagcctgtctttaagctcactagttgtttctcatgcttgatcaattctgctattaagagactgtgatgcattcatcagtatgtcatttgcatttttcaacaccagaatttctgtttgattctttttaattttttaaatttctctgttaaatttatctgatagaattctgaattctttctatgtgttatcttgaatttctttgagtttcctcaaagcagctattttgaattctgcttctgaaaggtgacatatctctgtctctctgggattggtgcctggtttcttgttcagtttgtttggtgaagtcattgtattagtctgttttcacactgctataaagatactatctgagactgggtaatttataaacaaaagaggtttatttgactcatagttctgcatgactgggaaggcctcaggaaacttacaatcatggtggaaggcaaagggaaaacaagcaccttcttcacaaggtggcaggagagagagggagggggaactgccagacacttttaaaccatcagatcttgtgggaagtcactcaccatcatgagaacagcatgggggaaactgcccccataatccaatcacctcccaccaggtccctccattgacacttggggtttacaatttgagataagatttgggtggggacacagagccaaaccatattagtcttgttttcttggatggtcttaatgcttatggaagtactaccagggtacctccaatgttttcttaaggcccaaggtttcttcattcagcttgtggtgaatgctgctaggcccagaactcatccttcaggacaggacagtaggattccctctgggtcaggataggttcagaaatgtcatccaataaccaaagcctgcaatctgggaccccaagagcccacttgatgctcttccccactgcgttcaagctggtacataagctgcaaaataaagtctcactcattcttttctctcctcttctcaagcagaaggggtctttccttggcaggatctgcatgttttgttgtctctgtgttgtacagtggaagagaaacaacacattttggggacagctaggacccatgcagatgaggtattggctcacaacccaaaccataatatacactatcaggcaagaggtattgcagttccagatcaagacccaaagtggaactatcaaaggggcaatcaggacttggggaggagagattatgtggtcacttgttggttggaagggatgaaggaatgtatgcaaaagcctgttaactatgagaaggttaagaaagtttctcagggcaaagatgtgaatccagctttgtttcaagggcgtttagttgaggccatcaggaaatatactaacactgatcctacctcaagagaaggacagacccttttgggagtacattttataacccagtcttcccctgatatccataggaagctataaaaagcagctatgggtccccatacttctatggaacagctcttgtatatggcattttagtttttaataacagggacaaagcagaggaggcagaaagaacaagaaggacttcccacaaggtgcagctcttggctctatccttaagctcatcccccacatggggctgccctcctggctcttggcctgaacaagggaagctgaaaggtgggaaagccaaatctgggtgtctgagtcaccatgccttgggcatgaattataagaaattcatgccttgggcacactgttagaaaactggccatggaagagggattgcccagtgcttagaagggagctactggcatctgaaccaatgatggccgaaatagccaggcaagtccaagagtgatggggcctgagatcttccaccacagctcccattggacaactaggcatatctctagaggagccttgggtaaccaatgacatggcaggtaagaatattaacctccttctggagtgcttattctgttttgacccattataatgggcctctcttaccccaaaactgtatggtcaggggaatagatggaaaagcccatagatgtcattttacctatcctttaagctgctcttcaaggactttggttttctcttgaatggcccaccccttgttaggaagggatttgttagctgcagacagtagtatcttttggaaatctcaacagacagaaattgctccttctctttttctgtgaataaatatcaggctttgttgctagatgctccttatataacacttaaagtatgccaaactttgaatccagctacctatttgcctaaacccacaggcaccctagatcattcttatatacaagttatggagcaagtttactccagccgtctggatttaaaggatgagcctctagataatcctgaggtagaatggtttacagatagaagtagctttgtgcaccagggaaacaggaaagctgggtatgctgttgtcagttaacatgaggtaattgaatctcaggccttaccagcttctacctcagctcaaaaggcagaattaatagctcttattagagccctgcaattaagaaaagatttaagagttaacatttacactgattctaagtatgcctttctggtacttcatgctcttgctgctatctagaaggaacagggactctgagctgctaagggttctcctgtaaaacatcacttagaaattctaaatctattagatgctgttttgctgcccaaggaagtagctgtaatccattgcagaggacgtcaaaaaggagactctaatgtggctaagggagactcctttgcagatacagctgctaaggcagcagcattaaaggagccagttggacttgtcggcaggtttgtaccctcagccacggcaatgacagaccctagatatactgaagaggaacaagaatgggctaaaggtcagggcttaattcaagagctttctggctggcttgtcaatgacagcaaactgttaatatcaggtgctaatcagtggaaaacagttaagtagttgcatgactctactcatttgggaagagcttccctgtttcacttaatgtctttttataggaaaaaagctttttatacgtaaaggcttacttaaaacagtaaagccggtaactagggcctgtgaactatgtgcctggaataacccaaataaccagtcttcacctcctcctctagtaaggcctgttcagcacaggggagcataccctggtgaagattggcaaacagactatacccagatgcccccatgtaaaatatttaaatatttattagtgttcattgacacctttaccagttggggttggatcaaggcttttcctacctggtctgaaaaggcaattgaggtttctaagctactaaaggaaataattcctaaatttgggctgcctaagcgcttacagaacaataatggcccatctttcacagcgacaattacccaaaacatatcttcagccttaggaattcaggaccgccttcccttggcatggaggtcacagtcttggggaaagtggaaagagccaatcaaactctaaagaggactcttgctaaacggtgccaagagacatcagaaacctggctgtctttattacctgtagccttattaagggttcgagtggcccctaagggaaatctgcagctcagcccttttgaaataatggatgaaagtcctttcttaactacagacctcctaatagacatagatactttcaagctacagagttatgtgatcaacttgggacaagtgcaaaacacacttcttgaatatggaaatcaaagactcccttcccctcctaaggaagagaatcttgttacaacacagctgggagactgggtcctattaaaaacttggaaggaaggatccccagcaggtcaactttcctcaaaatggaggtgaccctatcaagttctccttagtaccccaattgccattaaacttctgggaataaacaggtgggtctgcttatctggaattaaactcatttcttatgaagtcccacaggccaatggaacacaagagactgatcttgtttattcctgtgagccaatcagtgaccttcgactcctgttcagaagaaatgaaagggatgggtaacctaaagatatggattggcattctactttggaatataagttggaatcaggcagagagtaacttatttactgagtgggcacagactttagcctctctacataaccaaactgttgggtatgtggacattttaacagcagcttgagggagaacttgtgctttgatcaaagccgagtgctgtgtgtatgttccagactattcaaataatatcacccaagctatgaaagctttagacactcatatttctgccattgatacgctatcggcttggttgaccctatatcggcttggttccaacagctgcccagttcttggaaagcctttctgtttagtttacttgggaatgattttacttattttactttgcttttgtgggatatattgcagttgtactctttgtgcaggaatacaagacaagttcattcaacactttcttaaattggacacttattaatcttccagatattggaagattttttttgtcggaactcgcagttatgaacgaccttcgccataccaacgctctctgactgagctcctctctaccctaaatgcaagacaccatagttaggcaggaatatcatcacccctattcagcctgaagaagttacagaagacggatcttcatccctctgcaacccttaggattaaggtcctcttgtaaaggaagcagggagatatgtcaggggcattcgaaccagagcgactccatcttgaataagggctgggaaaatggggccatgacttgctgggctgcatcttcagaaaggtaggcattccgagcctctagatgttcacagttaagggaacaaattaataatgtttactaaacagaccccgacttgggagtgtccagatatcccgatatctgaagaagaaagacattcctaattttgctttgaagataataatatcgattcttgcaaaatatagtaattaggaaaattaatcctctatcacaaacccttgtagcagactatatctccccatatataccagcattgtacctagggtggatgcgtgcctccttttactttcaggaacgtcctactctgtctatggagtagctgtcctttcaccactttacttcttaataaacttgcttttgcttagcactgtggactcaccctgaattctttctggtgcaagatcaaagaaccctctcttggggtctggatcgggacccctttcctgtaaccagaatcaccctcttataagctaagtataacgtttagtggcaaggaatttcatatacagcaatgcagtgtgcttgaaattgcagaaataaacacttctacacttgcctaagataatactgagtcttcccaaaggaaatgcctttttttctcctattaacacaaaacagtatctaattccaattttctaaaaactccacacagtcagcataacctctgttatgagtagtatcttaactgtgttccctaacatttgttaaattatttggctaatgatacatcttaagtgaacaggtaggggttgtgatgttaagtcagggtcttggcacttttagttcatgaattgcgtttctctaatttaggttaacgaacagacttctgtactgttttgctgcatgtgctgagattagcattagttgatttaacttgacctaaagcttgcactttaactacaggttctaagctcatcctgaattatatctatcatttggctgagaaccctgctatctgctgagatactgtccttataaccatgcctttgtggctatagaaatagagttattatacaaatatgttccagttaatgggagacactcaggggaagcattgggaaaaatggcaaagagctttgccaatctgtgcttagtattaacccagtaattttgtaaattaagagctgagtttgcttttttttttttcttttgagacaaagtttcactcttgttgcccaggctggagtgcaatggcacaatctcagctcactgcaatctctacctaccgaattcaagcgattcttctgccttggcctcctgagtagctgggattacaggtgggcaccaccacgcccagctgattttttgtatttttagtagagatgggtcttcaccatgttggccaggctggtcttgaactcctgacctcaggtgatccacccgcctcgggttcccgaagtgctgggattacaggcatgagccgccgcgtccggcctgagtttgcttttttatttacagcctcaaactaaatttgaattgcacttttagaagtagaaggcaactacattttgatttcataaaattttgatcttaacatgatagcgtgtttgaagtttaatttttctaaaaacactatttgcttcaatttatctgtttgtgaaagaacataataaagagaggccactgataggggaagaaagagaaatattgcttgaacaagctcattccactagtcagacttgtcaaggaaaaggtgaactgatacctttttaaaataatattccgttcaagaaaagttgctcattttattcatgtttgacatttcatagtaaaggtaaaattcatttttaatgaaaaatactccacagggttattaattaaaagaaacacaggaagagagaactgtcattttaaaagagcagctcatgaattagagaaagtcaccagccgaaaacagagctcagtgatattctttccaggatagatggctggcctgctaatggaaacagccctaaagtgccccctgattggcacctgtgccatctgggcacgaggtatttttgcctcaaagcttcagcaaacttagagaagtagtttcttgagcttgttaattaaatgttttattataattcttttttgtgcattgttctttttatttttggtgtgcaacttgagggcaaagcatgtgaataatgtaatcatagcatctagagtagtattttgtactgtaatgttttgaatatatttggcaggttggtgaatcaacatttgcatgccttgtatttgcaagaggaccaaatacagatattacatggatttatattcctctaacataaataatatttctaggaaaaggtgaaagaggctagaattgtttaatttgttgaagagaagtgaatgccatgaaagtgtgtggcagagccaggtcgtgagaaaattgtaaaatttccatttgatgaattcacacttcttttctcccacttcctagaaacttctagtcttgcctctgtcgccacttcccccattttgttctccacacagctttgtggtgctcagaaacccgctcttctgttgactctgcctgacatcctttaggaagctgtagggcttgaagggtccaagatacagaatccttatgtccatgtcacaggaaccaatcgaaatatcaaaatgtgactgttattactgagaaagctgattagtggagatggtttcagggctgtatcaagtggtcctcctgatattttagccctgaattaggcaaacttaccatgcaggcacaggtatggctgaataactcctcattagacagttgcaatggaatgcatcatccctccaggcaggatggcttcaaaaggggagaggaagtggctaggctgtttattcttccaacctcaccaaccagagaggtcactcctttcccaaccccttacagacatgatgtttggagtctctctggccctggcttctgaccaaagtccttattccagggattgtttaaagaaaattgaataaaatatatgtgattggctctgtgaaagtttctgtctatattatacttgttgacagagttgataaatttagtgtttttgaacatttcataccatgttattctgacaaattccagtttttgttgaaagttagactccacttaatactgatttagtttaaggttttcttttctaggatgataacctctcattgttagaggacagtgtgctagtgtatggaattgacatggctgccactatgtttaggataacacaggcctgaccataggggtctaatgactttcagagattttctgcttcatgagcttctgatctacacaagcaaactgagtaaccagccatgaatttatttgctgcacaagataacttttgtgcgttaaaagcctggagagttgaccttcactcttgctggcaatttgtgcagtgtcaggatcctgcaggaaatgaggtggtcaagagcatcctctgctagactccaggtcaaagcaaaatgtagagggcaccgtctgaattgcagtctggatgtaccctttataatctccctggttatttctcccaacttccttctttctcccttcactcctcctcatgccagacagtccttcagattggaaggtattctgaaaactatgatatttaacttgattttttcccaaggattctgatttttcaaacccttagaaagaggcatgtggtgtgtaaaaaaattcctgctgttttagctatttcaagtcagaagaggttttcccagaaccctctgaatgatcggtttggtgaatgaacaatcatggtttctgaccgtagtgtgaaatgtggtgtcaggtgctgagacactccattttcatttagtttatctacttacgaatctataatatgcaaacttatgtggttatacttctcttcgtaattcatgctcaagatatgaacagttctttttgtctttatttagtatcccaaatcataataggtgctcaatgtttttacatttgatttgttgtcagaaagtccattgagcagtattttgagactatgatggtatggaaataactgatatgatggaagtaactcttaatttgagtgcccaccttaatctcttgtgcttcaatttggtcgtttttaaatgagaataattataatatctgacacttctgaagctcttacagtttagaaatctgtttaaaatgcagtatcttacatgtccttcagagaatataacattgtctccattttataaatgaaaaatccaagaacctgaggagttagataatgtgctataatccctcaatattaagtgacaaagtagtagtcctggaactaaagtctttgaaaagtttattaatttttctcttatatataatacatcccgtagagctcaaggaattattgggtgaagtaggtgaggtgatagcaaaggtatttttaaaatatcagtagtcatacaaatctgaagttaataagcaggattgtctttactaataaagcctttcaatactcttacttttctctttagttccctgaagttgtaagagttcaaagctgatagatgataaagcaattaaaatagaggtaaatctttgaatggtagtttcaaaaacttggctgtttatttcttgttcctttatttaaggaaccagctttctcttccttgctaagagagctttctttttcatttccttgctaagagagctttcttgtcattcagcaaatttctgggacttccacagtccctagagaatgaaactgcccagattgggggtggagtcgggtagaacagatccagagatatgacactttgtggatataggcaacacagtgaatatggtggtaaaggaccttgctggcctcagctgtgaggcccagcagggggtttgtatataaaagagagtttatgttttgatgcagatttctgacctttacctacacaaatgaggcaggaaatgctttcccgtattagattttttaaagatcttaatttcttttcagttctgttgttagacttctttaataaaaacaagttaacataattaaattttaataggtaaaaatcctaaataaggcaagaataaaaataattcagttaaactttcataacaaccaaaagcaaaacaaaaccaaaagatttcatagatttattctacgtcgatacccccaggtgattcttgtgcacagctttggaatcactgacctagaacagtggttttcaaccctggctgcacattagaattacccagggaacttagaaaaagagatatctatataccctgtcccaaactaatttaaattagaatctctaggggtgaggcccattatacttttattcacagctccccaggtgagtctaaactagagtcttagcggaaaaccatcgctttatacatgtatctttaatatcacacacatttatttgcacttctaaatattacacaatctccaggggtaaaatgccaggcaaaatgacgggaaaactcacttgtagttgagccattttctctgtctcttctccatggggaatagagagggaccaaaactggtcatcatcttctgtactattttaagggaaggcagttgcttttggggcagtggctttccaactgctgtgtacatgaatcatgcagagtgaatcctaagccccggtaccaggtcactacgattcagtatctctgaagtgaggcccagaaacctgcaacttgaataagctttccaagggattctgatgtaggtagtccatgatcctaacttttctctatagtttgatctaagggccttctgccaaattaatggcgccatggcatctcctccatgttgcctgcagtccttcatgtcataatcactttgcctggaattttatcactggagattgtataatctttagaagtgtaaataaatgtatatgatgttaaagacgtgtttaaagcgatggttttccactaaggctgtagtttagactcacctggggaactttgaataaaatacaatgggcctcagccctagagattctaatttaaattagtttgggacagggtatatagatatctctttttctaagttctctgggtaattctaatgtgcgccaggattgaaaacctctgttctaggtcagtgattccaaagctgtacacaagaatcacctgggggtatcgacatagaatcaatctatgaaatcttttggttttgttttgcttttggttgttatgaaagtttaactgaattatttttattcatgccttatttaggatttttacctattaaaatttaattatgttaatttgtttttattaaagaagtctaataataaaacctaagagaaactaagatctgtaaaaaatctaaaataagtggaaccatatgctgcatagagcactctattcttttttgctacttaggacgttagttatccgaagcttctaaaatatgttgtactctcctcatgccaccagtttccagatgatatttcatttcctccttccaggcctttgaggaagatattactgttcaattttatagccaaaaacctgagattcacagaggctaagtggatcatcaagattgtaaccctgataagcagcagaaacagaatttaaaccacagggttttactttgataccagtaatcttttcttatattacattgtctttagatacagaaaactcatgggcaattttggcagaactaacaatttataatgcttttcatttaaaacactaatgctattctttctttgcagagatttattttaaaacacaaatgtagaggctaccgtaaaataaaagcaggaaacaaaaccattactgtgtattttcaggaaagaatgattacataggtaggaaatttatagaaaataatatcaacttttactagccaaaatttcttcctcactctttctctctctgtggcaataaactttaaaaagttcatcctaagtaagctgcaaatatcactcataagggttgattctcctttccatgctttatgttatcattgggttgggggaggggaccaaacgtcagccactgcaagatcccagtaaagatgcaacaccttttacaatctaaaatctggataatttattgattttgattcacagttggtttggtatattcggtttattaaaagtgtgctactaggtgtgcaggtaggttgcaaccacaggcagtctgtatcacagagttagaagttactctacctgcaatatcacgagatttcccttaacatgacttcttccagtctaaaccagcctattgattaagtagacccttgtattgccaattatccccttatctgaaaatatagtatcgtctttttaatctccttcattagaaacatcaaacaccttgcaaagttcttaaggaatacgtgcaagccgcttaatttatcagtatgcttgtttgtttttctgggaaaactccattatgagtcttctttacatagcagtcattatagtttgaaattgtaatgctgcccttagaaatgtgagagggatatcttttacattaataagcatttttgcttttgtttcatactcagaataaatcaaggcacatgtttgtgacttctacttaaaaataagacatttctgaaaattagcaaagtaagtttagttaactaaataatggaagctggaaatgaaactgttagaagcttccaatgagttctttattttaaattgctgctcgaagctaatcagtttgtattgctctaaagagacagggagaagactttgcatgttagtggttattaattctgttcttactaagtactatccaaaagtgatttcttgacactgaataatcagctgtgcaatgcagagttcactaacctgcatttctacctccatgttaaatatcttttatgtgtagctcatcaaaatatatgaatggaaagataagcttaataaaaataaaggaaaaaatcagaatgaggttgaaatatagggatgttatccttttgggcttatgtctcttaaatatcatgtttttctctgaactagcttcatggctcaggaagtttttcggagtgccgtgaaaagaaagggcaagcttaggtgtaatgttagaaaatcagcaggagagcaaaatggggcaggggctggacagcaggaggagggcaatagtggctaaattatagctagaatgaggccacctctgtctgacaacctaggccagagaagtgattgtcacttgtttagctcctgagattagacaagtgtgcgtgtgcacacacactcaacaaagatggacaccgaaaagatgacatataatgacaagaagagtatctttctataatcaaatataccctcacaaatacccacatacacatcatccgtatattgtgttcacatgattgtttaacaaacattcattgatatcttattccttcctataatgagtctatcacagagggactcctacttgacctttgtttttcttctgttggtttaaccagacctgacctgtttaaatgtgtgaattctgggaaggaaaagcagcttaactatttatatggtctatgtttgtctgtcgagaggaaagattcttaacagtgctgcttcagatgttaaaacatttccctaccctccaaaatcatcatcttactttgctgaaaggtttacatttcattgtgttttatgttgattgcctagctataaaataccattaaaaggcgactgtaaatcaaagataatgttctactggcatccttgagatatgcagcaaactttcccttcagttcttcaagcaccctgcaggtttatatgacaaagagtaacactccaaatccctgccatagctctgggaacataaatttttgcccgcatgtaatgtttgtgtagggctttcttgtacaagtgttttggtctgtacaacagtaccatgattgaagctgggaggcctttgagatttatagtttcgatgggtcactgaactccatatcaaaagtatttgttgatgttctgtagacaacttagatattctccagtatgttgaccaataatctcttgtttttcaaatgactcaaatgttactgtagcattgccctcaaaatttcttctctaaaaatgcctacatactctaacacacaaaaaaagaaaaaaaaatttctcgcataaatagcgtagtcattttgactgtaggttgttagcctacagagccttagccaactgtaggcttcaaataaatctactgaactttttaaataagatctaaatattttcacatattggacaatgggtccttttaagagaggctttgaaagttttatcagattccaaaaaagtgtgtgactctagaagtgatttaacactgattttgatttaattcataagaagtgccaaataccactgtctttgaatatggcatggcagcatgatttgtattggagtgaatgttaactgttgacatttttaatgttcacatatttgggatgatccttaaatattcatattgtaccttaaaatctaattataggtaaagttaccacaaatctaagttcttcttgaaccctttacttctcctgtccaatttattccctctgtctggaatgcccttacatcctctccctttctctgcctgttgaagtcctttaagacccagctaaagtaacaccatctctaaagacttccagatttcctcattcagaattcatcttttgcttctccataatgctctttctatgtgcattccttttattaagggcccttttaaagtctaatttgtattgaggcatatgactgtatatttctaactggattgcgaactgctataaacaagagacatgttttattaatcactgcaccctccattaggcacagtgcctgatggtacttaaggaaatgcttcttgtttaactgtttgatgaatatcgagttgatatcagatgccctaagtatgattgtaggatctgatagcgatataaacacaaactacatattatccatggaatccttacttggcagtttattagcatatgtaaatcataatggtcaaggtaaattaaagaaatcattgtatgacattttaaaatgttttgttattatttatatgagatgatacactttcagccagtaatattgagtctcattcactcataatgagctctttgaggcacccagaaagcttaactgcactgagttctttcgaattcggttgtcctcccttatctgcagtttccctttctgtggtttcagctacccacagtcaactgcaatctgaaaatgttaaatgtaaaattctagaaaaaaaacattttgtatgttttaaattgtgggttgttctgagaagtgatgaaatctgaagcagtccagctccatcccactgaggataggaatcatctcttcatctggcatatacctactgtgtacactgtctgcacattagccatttagtagccgtctcagtcatcagattgactgtcatggtatcacagtgcttgtgttcaaatgatctttattttatttaataatggccccaaagtgcaagagtggtgatgccggagtgttattataattgttttatgttatgattaattgtttttaatctcttactgtgtccaatttatgaattaaactttatcataggtaggcgggtataggaaaaatgtatatggttcagactgtctgcagttttgggcatccactgggggccttggaattgtccccagtggataaggagagactactctattttgttatatataaaagtatttttagtaagtcttagcaagtaatagctgttaataatgaatgttgcatttcatagcttctgtttttagacattttaaagtggtactcgactgggatttcttttactttttcttttttagagcctattttcaggaagcctgacttctcaataattaagaatatcatgttttattacttacctcttaatatacagaatcactttcattctataaaactctgagtagatttatttttaaaatagctcatatttatataacactgtagagattcagatgcacttttatatgcatcatccaaggtgatcctcaggagaatgctgtgaggtaggctggatttcttctcattttaacagacgaataaacagactgagactctacttacctaaggccacttatgccaggtaagtgaggcaatgggtatagaacccaggaattatgactccagtggtagtcagtattcattctgctactattttgtgctccctctaaggtgcaagatataacctattcatgcaatagatatgccttgtgcactttcatgtgccaaatgctatatgttctaggtatttagggtgcatcagtaaacaaagccaacaaaaaatgaagtccttgttgagattaaatttgtgtttgggagaaaaacaaataagtaaaatgtataatctatttgaagataatgagagcaatggaggaaaatgaatcaggaaagaaggttcaagcatttgtggagggttgcaattgtatgtaggataattagacctcattaaaaaactgttgcttgaacaaagacttaaagaagataaggagcaaggcttatggatatccaagggatatgagcagaggaaataatgactataaaggacctgagagaaaaaagttttcttggcatgtttgaaggacagaatggaagccagttagcctgtactgtggtgagaaaggagtaaacagtgggatataaggtcaaaaggtgtagtcttggaattcactgtaagcgtaagagttaaagaaagagaaaagaaacatgaactgtggctcggcagtaaagacaggtttactttagataaaacctgagacggacttctggccaattttggtcaggagtgctttctcttacagactaagagtatatattggttttagggtgagggggcttaacagaagcttggaatgtttctgtgtgaggaagaagttttacggtggggttggaatgtctctgggaggaggcaagtttatctttgggcagacatctttccggcctgcggggcattatctcaaggctggcatcttcctggctggagggaggttatcttggggccggcatgtcttttgtctgggtggagtttggaatgtttctgtctggagatgttatttgtggtttatggtcatgctgaccttagccatcaggctgatgccctttggatttagacagctttttttttttattaaggtgaactttagaatgaggggcttgtctaagatagcaatgctcctcctctgtcagtaaggactttcatttctgctctgaatgtgataggaagccagtggaggattttgaatagaagagtaatatgatctaacttacagtttaagaggtttgctcttgttttcatcttacatgtcaagaatagattacagaggtgggggtggagatgatgcagaagtgtagaataggagaagagaccagtgaaaagtcttgcaacaacccaagcattgggaattgcatgagttagctagggctgccataacaaagcaccaaaacaaacagcaatttatcgactcacaaatctagagccttaaagcctgaaatcaagacttcagcagggccatagtctctctgacagctctagagaagaatccttccttgtctcttttagcttctgttgtttgttggcaatcttttgagttcctgggctggtagagggatcactccagccacctggctatttccccactatgtgtcttcatgtcatcttcccactgttcctatctgtctctttttataaaggacatcagtcatattggattagggtccatcctaataaccatttttttgtaaactcaattaaccctgtaaagaccttacctccaaatgaagtgacattgaagatgctgggtatcaggacttcaacgtatctttgttggaggacacaatttggaggacactgttatggaggattcataacagtggcattggccagagtggtatcggtgagaagtggatggattgtggatgtattttgaaggtggagtaccgcctattataaattccaataagtactagatatgattatttttgttgttaaaattattatcctgatcccagtagtagcagtacttatctgaatgataacaagcccatgtttgcttaggtattgtgtgaagaagacagtaacagtgaaattgaagaatctcaggcatctaatccatatgttcagttcaaggggtttctagggtatctcacatgttcctgaatagccttgccttgctgttccccactgcctgctttgccctataaccagggctactatcactcttgagcccaagtgagtcccttcctgatgacagctacagcttcagcattcttgtcacccccttatatcatcaacattggtttgattatatctactcttccttttgactcttgtgctacaaaatcctcctcccactttcaaactgaatatcattaagctttatttcctgcaagaactctgatagggtgtcaggtataaggattgtacatcagctctaacacatggagacagatatgacatcttcctccattttaaggcatatatatctaggcttgcctgctccaaggacttgtctgcacttgtcttgacttcaaatgagtacatagtgcaagactttactggcactgtcctataatatatcagaatacgaattttttcatggatttttgaaatgtttcaacgtatatatttctaaatgatgacattgaggttaaagcataacaagggtttattattaataataattacttttaattataaaaattgatgttaagttttggctatgattcaagttactgtgctatgcagttgtgaaaaaaggaccaagtcacgttccctgccttagagcacttaaagtttggtgaggaggagagagatgctaataggtaatttcaatataaaattttaaattctttgagagattatatggtgttctaggagcccatttgtggacacttatgagcaggaggctagtggagaaggcataatgctagtgtatgtggggattgggtaaataggggcaagaggaggggcttcctggaaagaaatgatggtgctttccctgaaacacttggccaaagtcaaacagcatggtcaaaggtatcttagggagagatgcagacctcaaaaggcatggaggcataaaatattatgactttaactagaaactgtaagtggtttgttatcaatagcacagaaaccataggcatgagagttccagctgctaaaactgaggatagaggtaagggtcagagcagcagtagagcatcccgtgtgccttgaaacagctcaaactagagccattgaaggggtttaagcagtggatagaataggcagattttcattttggaaatttctctctggtggaatgatgacgggtgattttcgatgaatcatcactggaagcagatatgttggggggtggggaagagagaggcgtataggatagcttagacttcagattgaatatattgagccattggccaagagggaaatggaagtcagagcacacagtatgaggataatcattagttaggataatgattttggcacataattatcttggatatgctgactttgaagtgccagtagaatatatagatggttgtgtctaacagatttggatagtgagatctgcaccatgttgggtatgttaaatgtcctgagagtggagaacctcacttgggaaaagaacgtaatgttaaaagagcattgggtcaaggactgaactatggggagcaccagtgtttgaagggatgatagagagcccatgaatgccaataaaggaagcacaagaagatatcatggttgccaagagatttactggaagagtaaagtggccaatagtgtcaaatgcagcggggtgatctccactaagttatggactgtgggccacagagtgtccactggatttgtctatgtgggaatgaattatagtgaccagagagaaagaaaacagttatatgtgggaatagtggcacaaaagctaagttatgtgggttgctgcccaaacagcatgagtaaaagtagtacctatatgtcttcgtttgggctgctgtactaaattgccatatactgggggttgcttaaacaacaaatacatatttctcacagttctagaggctgagaagtctaagatcaaggtaccagcagaacaggtgtctagtgagagcctgtttcctggtttgtgatgactgtcatctcattgtatccttatatggtagagggcagagagagaaagcaatctctctcgtgtctcttcatgatgggacactaatccatcataagggttctaccctcatggactaattcgtcttcaaataccatcacagtgaggattagggtttcaacatgtgaatttggggggaagaggacatattcagttcatatcactatattatataaactattatttcaagataattgtatcagactgggacccagcaggaaagaagcagcagattctgcttgggtaatctgggcttggctaaaaaacaggcttacttacaaagtatggacagtccttatggttttcctatgtaagtaatagtaaactatgcatgggctaattatagcacaccactatcatttattatcctaaagagatgagaagagagagagaaggagggggacaagaagaaggagagagagagatgagagagaatagaagagaggaggggaggcaacgagaaagagagagagacagaaagagagaaactgtatcaagaccgtatcaagagggttgcctgacaggagctgtgatccttaacaaggaaattgttagcccatggagacatctctaggaggagctgggataataaagaccctggtcttcactttcctttctaccttatattttcttctagtgcttcccattggtcacacgcaactgaaaacaaagcaataagtaagcccatcaaaatagtcatacaggctaagattgcagggcacagggctaggtagggaagggtggggagtagctctggatagggtaaatatattcagcacaaaatcatttcggatagagaagaggatattagttaaagtggctgcaaatttaaaggaaacaattgagttttgacttttgtgagttttttttttttcctttatcaggatgggagagaggagctaaaagccgaggtaagtgataccaataaaaaggaagttaaagctactttatgatataaggatataactgatgcagaaaagtcttgacagattcagacaatcagataaggagccacagtaaaatgattggctttaaacagaaggaagaaaattttatttcctccaagggaaaggaaagagaaaaagaagcacggttgtgttcattctataggtggagaggggaacagatgggagaggcaagaaattgagagagctgattgctttgccccagttttcctgatacagaaggcataaacgtgatatgccttctgctgatagtaagaggtggggatctgtgtggattttgaagagagttttgactaattgatacagtcactgaaggatgcaaaagaaggagttggccaagaacaagaaaattttatgggaagccctatggccaagaacaagaaaattttatgggaagccctattgatggctagagtttctacacgatcacatgtgcccttgtgtgtggctgaggaattttctcattcagtggtgtgtgctcaacagcctgaatgtgtaactcaagaaggccagttgaagggataatttagcatcagagttttgttagattagttcagtggtagggcagaaccaaagggaaggaggccattggtgatcattcctcaaaatccattttaaacagctgagatcattttattttcctcttattcttttgggggctatttttaaaaaatatatttgcaacgcatctaaacctgtggcaatggtggcattcttagaactatttcataaagttcaggtaacaaaattcctacaagtattataattagcattttcattcttagtacaacaaatatcttctgaagattaaagcaaatattgcaaaaggcagatgaattcaggtgaggttcaaattttagtagaaaattgtagtatgtttatatacctatattccaggtgtaaaccatcaacagtttgctatatccatgcagcatagagttaactaattaatgttgtatttcaaaaggaagagaactacactgaacttcagtgacattttcccttcatttcttccccatcaatgtgattagtatttttttaatttttaatttaattttatttatttattttttaatttattattattattattttttagacggagtctccctctgttgcccaggctggagtgcagtggcgcgatcttggctcactgcaacctctgcctcccaggttcaagagattctccagcttcagcctcccaagtagctgggattataggcacccaccaccatgcccagctaatttttgcatttttagtagagatggggtttcaccatattggccaggctggtcttgaactcctgacctcaagtgatcctcctgcctcagcctcccaaagtgcagggattacaggtgtaagccactgcacctggtctgtgattagtattttttaaagtagccaattataattttcaatatcctacaaatgctattttttacaaataaaataaattcagtggaaaatagtcttgttagaaaggagttctacatgctatagctaccaccttccatctatactaagtgtttggaatgtagttaaatacaacccagttgtaaattattcctttgtggttttactctaccagcttttgatatatgtgtctttgcatgggagataaactttgcccaccagtaagatagattttaattctacataatatcatcccattagaaatgaagatttctgtcagtctattatgttatcagatacatttaacaaataaacactcccctgttgttgttcttgatagatgaggaaagaggtttcttgcttctgctaatatcaaacaagataaaagaatctggagagatatctcttttcatatagtgaagagtaacagaaggaaactaaagaagaggaatgtgagtcatgcaaattgattagtatgttattgattgtagtaattgatccatggtgggccttactgctgtaaaattattgattttgttctctttcaaccatttccttcatagctatccaaggaggtaggataataatatctacagaaatctctactttctaaggcaatgcttgaaattaaataaatatgctgtagcagctactttattttggctttagtaaaataaggattagaagataatactttatccacgtttcttgtccttacatataatccattaaatcctaaaactgtattttcatttttaaatataaaaggaagtgcctagagtaactatgtattcttgcacaatctggaagcaaagacctggtttgtatgccaagaagtgtagattattttaattttatttttcacttcaattttataaaaaagtttatatgacaataagactaagtcaaactgaaaattcacagaaaattcatcaggtttgtttttaaaaagaaatgaccactactaaaatcaacctatccccaaatttaagtattgtaacacggtaacattataattcttatttatataacaattcaaagcaagtgtttggtggacagcctttcattgtgtgattcagggacccagggcctctcttctgctgacttctttgtcccctagatgtactggtgcttcacttctagctgacagcaaaagagtgggttttgcagaaaatttgtagtaggctagacctggacatgtcacattatttctgctcatgttcccttagctagagctcagccatgtggcaattcctgtctctaagggaggcaaggaaatgtcatctagcattgtgcaaaggaagaagaggaaatagtttggggatcttagtcatctctgccatagagattgactctatggcttatccttcttacacctagaactcagagtagacaatagcaagtctcatccaggcacagtatctcattcaaagtccaggatctccagacaacatgcagttctgttgctcaggtctggaaactcaatagttgttttgagacatgttaaaattgagatccctactggctatttaagtggagatgttgagtaagtcgctaaatatatgtagtgttcatatgtcctcctttgcccaggacagtgctgatttatgtctgtagtcctggaataattatgaatagcaccttcatctctaaaatgtattaagtttagatgatacattatatggatataagaatctggagtttagagaagagactgtaactatattaaaaagtgttattaatcaagctatagctgttatttaaagtgatgaaacctcaggtactctgacagttagaatcaggaagaggaagaagatccagataaggtgactgaggctggtcactgaccaaggactagcatatgagctaggagagtgtgggggttacatagccttgggaaaaagaaaacatagtgaatgcactcatggaactcactgttttttgggaaaaattgaaattttaaaaagtaaattaaaaattatctttctagattaacttttcatctcttagtctcgagaacacttgacttcaagtacatattatagaacagctcaaggttctttaaatgccccatgctcttagtcttctacacctgtctactaactgtgtctctctgccccgttccttctaggctttatccttttgatgaattcctactatattaataactaatactgacaaagagaatgcatttcatgtatcagttacacttcaaagttcttcagatccagcaaccatcatataaggcccagttagtatccccttttaaaaatgaagaaaatgaggcacaaaaaggttaaataacttctccagaatcacatatctaatgaatatatgaatgacgatttgaatgtcaatcagcatgacagcagagcttatgctcttaccaaagcatttcacgtggcttagtaattataaactaataaaaatattggttagatattatattttagctttaaaccttgaaatgtacatttagttaccaatgttttgagccattaataatctttcttataaaaacaataccagaacatagcctctgaggtttccaattttggtttcttttctttttctcatttttttttttttttctttgagacagaatcttgctctgtctcccaggctggagtgcagtggtgtgatcttggctcactgcaacctctgcctcccgagttcaagcgattctcctgcctcagcctcacaagtagctgggattacagacacctgccaccacgcccagctattttttttttttgtagtttaatagagatagggtttcgccgtgatggccaggctggtcttgaactcctgacctcagatgatctgcccgcctcagcctcctaaggtgtgggattaacaggagtgagccaccacaccccaccagctttggtttctttaaagtggagcaagaaactctgctgatagacatacatataactgactattgataagcatacaattcagctgctggaagtagaggttcacaggctgactgctctggagtatctcgtgtgctatgcatatcagtcagtgcattttgcaaggagaatggaaaatcatggtcaagctagtcatgttgattaagtggaagtcagctaaagagcgtttagtctgtttagtactttttgcattcacctacttctggatttacacagtatgttaaaattacctgcttataagtctcctgctttttttttttttttttaccagactgtaagcagtgtcgttattttattcatcttggtattctcagcacccacagccctgcatgtgattaggggctcctataaatgtttgatgaattataatacactgaattaatatagttacatgcttatgagagggcctgcttccactaaactgagaatatttggggatgggacaaacacttattatttaagtaaacttcttatgaaaatatacctcatatatagaaatgtctacaaatcataagtgtactatttgatgcattttcacaaactgaacacatacatgtactcagcatctagctcaagaaacagaacaggaaacatgtcagaagcttattccctgctctgttgcattcactacacactcctatgcaagctttacctactcaattttttcttttttttttgagacagagtctcactctgttgcccatgctggagtgcagtggcgtgatctcggctcactgtcacccccacgtcccaggttcaagtgattctcctgcctcagcttcccaagtagctgggatggcaggcatgtgccaccatgtccagctaatttttgtatttttagtagagacggggttttaccacgctggccagactggtctcaaactcctgacctcaagtgatccacccacctcagcctcccaaagcactgggattataggcacaagccactctgcctgcccctactcacttttaacactttagatccattttgcctcttttttatatttttagaattatctgaatagaatcatataataggtattcatttgtatctggcacctttcactcaatgttattttgcagccattattcactgttgtctatagttgtggttcaacaattttcattgtagagttttgtaccaactgaatacacttcaatgtatgtatttattctacccttgataaacacttttatttccaattcagggctattataaacagtgttgctgcctacctccttgtacatgcctttttatctacatgtgtacaaccttttctggaaggagtacctaagagtaaaattgctgaatctatagtgtgtctatcttcagctttagtagatactcatcaagcagttttccaaatggttctatgaatttgcattcccccataagattacaagagttccgtttttctatttttttttttcattttagccatcctgatgagtgtgtaggggtaatacattgtggttttaaattgtactcttttgatgcctaattaagatgaacactgtcccatatatttaatggctatttgcatgacttcttgtggtaaaatgctcattttctattggaattatctttgttcttaataatttgtaacaattttttatagattctggatatgagtttttatcgggtatatgcattgcatttatctcctttcactcttccttgccttttgattatcctcttggtgtctgtcaaagaaaaaaatctgaattttaatgtaatctgatttattctttttttccctttatggttaccacttttgtgtgatgtttaagaaatcttatcgtatcccaacgttatgaagattttctcctgttttttctttgaaaagctttatgtttttttacgtatcacattacaatctgcagtctatttagagttgatttagttatacggtgtgaggtaaaggtcaagatacatctattttgacatggatgttccatttatccggtacttatatttaaatgatcattgtttcccctgtgtactgcagtattatcttcatcataattcagtgtccaaatatgtgtgagtcaatttctagacactgtattctgttcatttacttattgtctattcttgtgctaatatcacactatctcaattactgtcattcttagtagtaaaatatggggcagtataaatcttccagttttttcttcttaatgaatattgctttggctattgtaggccttttgcattttcatataaactgtataactaggttgttaatttctgcaaaaagatcctgcaggattttgatttggattataacaaatacatgaacaaattagagaagagcttttatcttaacaatgatcagtcttccaaaccatagacatgacctatccctgcatttgttatttttgtgttccctgtgcatagtatgtgtctggagttcagctgactctcaaaattgtgaactcttctactgtccctccttccactctgatatcatcaattgactgtgaactctcatactttcccattcttacaccatgctgtcctcaactagaaatactcaattgtctcttcagagattatctttccttcagggtcacaactccctggagtttcaactgggccaaaggaaactgtgctttagaaaatggcaaaaactcttctcacactgcccaaagataataggagactacctctaattacagaaatatatggaatttgaggttcttccacccaaaagtaacacaactaaagataagtagaatatgacagtgggagatctattttgactgtataaagacatgttctttctttctttttaaatttcaatcgctttgggagtacaagtggctttgagttacgtggataaattgtatagtggtgaaatttgggcttttaagacatttttgaatagaataaatcacagatacatatgtgttttttaaacgttggatttggtaacaattatataaagatctttaggaagatttcagtgaaattatatattctaatgtgttagaatattatttttcatgcctcaataatgcacagagctcaaatctctttaaccagactttccaatgatgacagctcaaggtgtacttcgtagggcctctgccggctttgctgtgtgtttgcatgctggtgggcaaatgcactggcagatgtcagtcacttaaacaggctcttttttgtttcaaattctaagtttcaattcttggcaattgcaacactacagaaacaggcagtgtggcttctaatacttgtcctttgacttaaataattaaagttcaacactacagcaacaaagttattagctagtacttgactctagacactacaggtcaattactggccagcaatgtttagaagcacaaaccttggtaattagcagcaaatttcatcttctctcagcacagtatgtgagcatgccaccagaataagcagaattaaaacacaaataaaagcagctcatgtatcctagatttataattgctactaaggaccatagaaatttcagcagagttgggtgcaaggaaattttgacacctggaaaatggggcaagtatgttatcttttagcaagaagttaccttaggaataatttaaggagtataaaatagattatatatatctttttcttttgaagcttcaggtactgacctcttgtgttgttgtatattcaaagatagatagagctgaaaagaagcaagttcagccccatcttttaatcactatttaaataaagaatagtgatcacatagctagttagaatcctggctagtactggaacgccaatcatcaaataacctatcattgatctttacattagatactctaaacatcaaatctccggcaaaggaagttatcaaattgggggtggtactaataaccagtgctatttctaatagacttttactaaataaaacataaattagtatacatggcacattactttctgatctgtgaaaggcgaggaaatactgtctcctctggattatctaaatgtattgaacaatcaaattcttgagttggaatggggtggaaatgatccaaataggcagggcaaagccacttgcatgtctgattttcttctatggaaagttagaaaatctagatggcaaataaaaggctaccgtaccagaatttgattattttgcaaccaacaaatacttagagaccccattctcaattttggacctgggtgaacacatgctcattcaattcaaaataagcagttgatatctgttttacatggaatagctacactattctgataaaataaagaatgatttaccttaagtagatttttctgtacacctgatgcttagaaggtcaaagtggcttggccaaatttattcaggtacccaaacacttgcctcttggatctcagggaattctttatttttaaaaactttcaccccacacttttcatccagaaataacataccccatgagggatgtgaagagtggggtcagaaaccagaaaaagtgagttctaggtcaaactgtgaatgaatgtctatacatccaagtggctaatcactttgactctctgagtttctgctatcaaataccacaatattacaaacactaaacccccaaaatatgttattttatgtaaatttgatttagctgtgaaaaattgaaattgtaatgtatcatctattctacatatacatttctaagtctttccagaagataatacttaatagaagataattcttaataatagagaaagattatttacctactcagcctgttttttgtaacagtgaagaatttatgcatgtgtgtgatattaagtgaaaattacattattcttttagaaagcaaatgtaaaaattgacaactatttaaatacacatgctggacttgtctttataaatacaagctgtagaaaatttcttttatggtaaaaaaaaaaatctttaaagatattgtatctaccctaggttggtaattgttccccctgagtcacagccattatcttccaaggcgagagctaaagccccctgtgagatgtgtttctggggacaatggaatagtctcaaatgagatcagtagggtagtgtatttgaaagtgcattacaagctacaaaacaaaattgtacatagcattagcagtgtcgatataaaatagtggaaggaacactggagttggcagtaggaaacgggtttcagtcagagctcggctgtttactagctggtgagcttaggcaagtcatataacttctctgagcctcaactgtcaaatggaaataataataattgccctgactgatgtacagagttgcaaggggaaaatgaggtaacatggaagagctttataaagtgtattacgtttgccaatgtcaaatgatgttatttttcacatacataccgaagagtcccagtatatattaatatgtatgtatttactttctgcatgttaaacttccagcatatggagtcataactttagtgattcatgagtaagtgattcaacctctttaatcatttaatttcctttactccaggccagttacaaaaatttagttcaagtattcttaaatcagagtagcctagtccttaagtccaatgaaccttggttagaaaccctgctttgtcactcttcactgtgtagacttggggaagatttttaaatctccctaagcctcaggttttttttcatctttataatggattattatgaaaattaactgagacagtgatccatttgtagtatttagtataactcccctaatcctgggaattttattttaatgttcccaagatgaaaacatgtgagaacaatctgtattgtaactggaataattatgtttcaaagacaatgtggtctaatggttcatttaatggcctcaggcaagtactgggtgctgtattcttacattcccagcagaacatgagggtgagggtttttctttatcattttgttcaaatgagcttagatgtgctacaaattcaatgctaagaacttagaattaaaatgatgatattcttctgaatatttttccaaattttcaaatgctaatgattaggtggcaattccagtgctactgggcattgacttaaattggttccagtagtgggctttctcgccatttattctaaaatatgtgatattgacttagcaggagtagaaacaggtaaggaaattaatatttgagacttggaaagatgaagacaagtattatttaataacaaaacatttggtatattttctacctgtgattgccttccagtgctatagctctattggaaaagggtggaaaacaatattagtaatgtttgggttgtggctagttatgtttaacatggcactaaatgaaagaggtgatgccagattagtgttggctggcttgtatgtagatatggaaatgaaattagactaggtaggagggaaataaaaataaaattaaaatccattgtattaaaaaaaatctgttaagaatcagtttgggggcaaagatgagattaggaatctgacctttccaccaagcctgaacccttcaatacagttgccaatctatttgccatagaaagagagagagagagagagagacgagtgagtgagagagagagagaaagaaacatgatgtcaagaaagcaaaagattaaatcagaccagagaattatatctaggaaagtacttcttgtgaagttcccagaacatggaattgactgtaaatagatcagaagcttactaaagtttttgagaaaattacattgccaaagaaaccacaagtttgatctttaaaaatcttttttctatgagcccaaaagcaaactttgggtcctcaaatttgcacaggcaggaagtagctgaggaagccctacagtcctaaaataggacaaattctccaatacccatatcagatctcactatagagaaatacggacaaagaaggacctccaagaacatagaatcaggagacacagagaacaatggatgaaagagcttatccctgatagctgactaagagaataataaaggaatttattccactgccagggcagagggaacctcagaatgcctgcctggtagatttcatcactgctatagaccagtccgcagtcatcactcttcgccatttttatgggagtgtttagtcagttatcctatcgcttcttcacttttgcatactgtgcatgtgtgtatataggtatacagtgtgtgtgtgtgcgtgcacgcgcatctgtaatggtgtggataacttgtctttctagtttataggccaccattccaggtaccatcttggaaaatggcactaccatttgtccttcggcttagactaaaaagagtgttgttgttgttgtttttcctctgggattattcatccagcacatccacaaacctgtcagttttactgaccaaataaatctgaagctgcttctcactccctccatttctatctccctaatctaagttaacataatatctcacctgaactactcaaaaagtctctttttttcttttttgagacagagtctcgctgtgtcacccaggatggagtgcagtggcgcgatctcagctcagtgcaggctccgcctcccgggttcacgccattctcctgcctcagcctcccgagtagctgggacttacaggtgtccgccaccatgcctggctaatttttttgttgttgttagtagagacggggtcaaaaagtctcttaattagtatctcttcttctatccttccaacctttcaatgtgtgagtggaagtgagattatgtgagtcctctgctccaaatttcccatgacttcccctcccctcacaggtaaaatctgaagtccctggccacctcttccacgtcctctccagcattctcctcctgtttactaaaggctacccactatatcttccttaatgtgcttgaaacatacaaagcattttcccaccttaagatttcccctctctgagccctctccagggcccacttcttcattcatgaatatctcgctcaaatatcacctccccatagatactcaaccactctgccattccctatgtccttatactttatttttctttgtagcccccttcaccgtcagacatcatataaaatatctcaggatttttgctttgtttacagatatattcctaactccaaaacagagcttggaacatggtagatgtttaacacatatccgtaatgtaaatatcttgtatgtgctgcatctcagcacttaataagaggcacgttaaagtgaactaaatatggcctgagaaggattctgtacttctgtatttgagtccttgtggatgaactgtaacgtagcttaataggtagacaagattgaaaacctgatttaggagtatgtgcctgtaacaatagctaagtcttggccaatcccagcgccgtacttcaaccgttcatatgctgctgagtcttcaaactgttcaagtaagggaaacactgagctgtaaccaatctagccattctgtacctcacttccaaattctgtacatcttttcctttttttgtctacaaatcttctttcgccgtgtggctgcgctggagtggttgtgaatccgctgtgattctgggggctgcccaattcacgaatcgttcattgctcaattaaactcctttcaatttaattcggctgaagtttttcttttatcaggcataaagtaagtgctattggggtatagcataggatggaccaactctgactgacaggctagtgaaagcttcctagctggcttcatgggtgtgcaacctgtgcagatatgcagggccatgcacttggaaagatcctgcttttggtgtaatgttctgtttttgccatcttgaaattcttcataattttgaacaaggagacctgtattttttattgaagtatagttcccattccatacaattcacaatattttaagtatacaatttagcattttttagtgtattcacaaagttgggcaaccatccccattatctaattctagaacattttcatcatccccagaagaaacccacaaacatttgtggtcattccactttctcactttcccttatgcctagcagccatttatatactctctgattctaagtttgccatttcaagacattgcatgtaagtgaaatcatttaagatgtggcccctttagtcaggttcctctcacttagcatgatgttttccaggtttctctacattgcattatgtgtctatactgtatttctttttgcggctgaatagtatttcattgtatggatacactacatttttgtcaattcatcaattaatgaatatgtgggttgtttctactttttggctatcataaatgatgctgctgtgagcattcatgtacaagtttttgtgtgactatatgttttcaattctcttggctatataggagtagaattgctgggtcatatggctactctatgatttactttttgagacactgccaagctgttttccacagaagctatgccattttacattccttccagcaatgtgtgagggttccagtttctccacatccttccgacacttgttattttctgtgttttttactacagccatcctagaggatgtgaaatgatagcttattgtagttttaatttgcatttctccaatgactaatgatgagtatcttttcatatgcctattggccatttatagatcttctttcaataaatgtctattcaaattttttgatgattttaaaattatttttcttttgtgtttttatttctgagttataatagctctttatatattctggatactaaacctatatcagatatattattattattatattttaaattcgggggtagatatgcaggtttgttgcatggatatgtcgtgtgatgctgaggttggggcttctattgaacccatcacccaaatagtgaacagagtacccaatattgggtagtgaaaaaccacacaataattaattttttaacccttgcccccttgcctcccttctctcttttagagtccccagtgtctgttgttcctgtctttacatctgtgtgtacccaatgtttagctcctacttgtaagtgagaccatgcagcatttgattttctgtttctgtgttaatttaggataatggcttctagctgcctccatattgctgcacaggacatgactgcattcatttttgtggctgcatagtattccgtggtgtataccacctttactttatgcaaccagatatattatttgcaaacattttctctaattctgtgagttgccttttcactttgatagtgtcctttgaagtacaagcatttttaattttgatgaagtccaatgaatttatttgttctttgctgccttgagatttacgtacctatctacgaaaccattgtctaattcagggtcactaaaatttacacctttgctttcttctaagaactttaaagttttagctcttgcagttaggtcttttatccattataagtttaattttgtatatagtgttaggcagatatccacattcatttcttgtttgtgtatatgcagttgtttcagtatcattttttcaaaagattattcttctttaagacatcattgaattgctttgacaaccttgtcaaaaaccggttgaccatagatgcataggtttatttcaggactctcagttgtattccactgatatttatgtctattcttatgccagtaccaaatcctttaattactgtagttttgttataaattttaaaagtgttaagtgtaagtcctccaactttgttctctttttccaatattgtttcaactattctgggtcccttgcattttcatctaaaatttagagtcagtttatcaatttctgaaaaatgggctgttgaaattttgatgaaaattgtatcaaaactatagattaacttgggtagtattgccatgttagcaatattgttttctaatatgtaaacatgagatctttccatttatttaggttttctttaatatatgtctatgttttgtagtttttctatgtgcaactcctacacttcttcttttgataaatttattccttttattctccttgaagctattgtcaataacattattttcttaatttcattttcagatggttcatggctagtgcatagaaatacaacagatttttatattgaatgtgtatactgcatccttgctgaactcctttatccattctagcaggtttttcatgtatttcttaagattttctatatgcatgatcatgtcatctctaaatagaggagttttaattcttcctttctattctggatatcttttattttattttcttgacaatttccttggctagaaccccccaatacaatgttaagtagaagtgatgggatcatacctgcgcctctctttgctgatattagggggaaagcttctagtattttactataaagtatgatgttagaggccctgactttttaatcttgcatcgggctctgaaaattatgtagctagaactaccttataaagaaggacacagttgagctgagtatcacaggacaagtaggagttctccagtgggtgaggaggaagaaggggaacagtatatgcaaatatcatgaatacatgctcgaactcaaagtgactcagtgtggcaggtgtgtggaggccaagtgaggagtgaaggaagcagaggttagagaagtaggtagggctggaccactgctggattgctgacttcttactaaggagtttggattttattctgtaatttttagactagtatactattatattttatattcaacatcaaagagtagaatgaagaaaaacgagactaaaaattgaggcaaggagagcaattcatgggctactgcaatgtttgatacagtgaatcaaaaccttgtcagattaaccttggaatagctgtattcttgctcttgaagactttgctttccttctatatttttttaaatgaaaaatttgtacaaataaaaacataggtattgagcaccatatttcaaagttaggctagcattgataaagtttacaatgttttgttcattgtgaaaaacatattttcatgtttatgatagcctgaagaattgagataaatgatcttttacacggtaaagaaaatgacgcttagaacatttcattagttatttcagtaactgtattagtaatcctagaatcttttgcatttgcatcatactaatccttcttacattaggcatcacctgccacattagcaaaaccaaaagatattccttccctatccctcctttcctccctccctcagtccctccctcccttcctccctttctgccttcctctctttttcctctctacccattttccttccttcctttttctttacatttacttaattaattaattcttcaaaaattttaggacctaagagactggactagatctataacacattttgtgccctcggagagcttacagattgatgagtggctgaagtaaacaaggctgccacatctcaaaacagagtatcatgcatcattgttaccctaagcacatctaaatttgtagaatggtcatttgcgacagccccatcactgtggccttcactgagagtttacagcctctgatatatacatggtagcattgaataaataatgctttgttgtattagttcacgttgtcatggattggagggctagagttagaattcgtgactaagatgatggaagcagtaagaagaaccaaagaatcaaaccaactaaatcccaggagagtcagatgaaccagagctactcactgcttgatcacatatagctataaattcctagtcgattcacagatctagaaagtgatgagccatttgagagaaaacacctctctcttttcctcaaattatgtaacactgaatccatgacattaaacaaatgattctaaccttttttttcttgcctttattggatttcaaagttcagtacacattcaaattattcaattttgatatcacttttatgatcaaatgtcctacttttgaaatggaaagctcagttggccatgttccctgttaagtttaagaagcttttatcacttaaataaattaaaccttccagcatggattctgcagaacataatgaagcacagaggaaaaaaagcttaaatgaaataaacctctttgctgatagaaacagtacaggttattgtgcattctaccaataaatgtgtagctggaaccgtagcctgatttctggtttttaaattttgtccttaatttttatagtgttcagcagcaatctgatttgccattggacaaaagatggacacaatgtacatgaagtaaaaagggtctaggtttttaatactgagaataaaaccaaatactaggtttttaaaagctgatttcttttaatactacattgataagtaaggatatatatttttcacaccatttaattcatacaagttgaactcttatgaactcaaatcctttaacactttctataataatttcttcatggtttaaaaaaatgcttgttttctagagaaaaatgatcatctatataataattgggtaaaattaagctatataaattacatattgaattagcaggagacattttactttttgagttacaatttgccagttgcccatgaaagattcaattggattatgaaaaatcttactgtttatagattctttcaatggccaaagtgttgggtgcaatttttaaaatgtaaataaaaacacaccattttaaagagtttaactaaataaaattcatcaatgtttccactatgttaagttgaaccattttactatatgcatgttaaaaataaagctaaaggtaaaaagcccttctttttaaaatttttatttattattatttttgagacccaggctgacatgcaatggcatgatcttagcttactggaacctcagattcctgagctcaggtgatcctcctgcctcagcctcccaagtagctaggaccacgggcatgcaccaccatgcatatctatttttttttttaaattttattgtagagatagggtctccctgtgttacccagggtggtctcaaacttctgggctcaagtgatcctcccactttggcctcccaaagggctgggattacaggcatgaaccaccatgcccagccaaaaggcccttcttaaaaggaaacattcagtagaattaatttgagaatactcataatggtaatgtataataattaccatggaaatatagctttcttggtaataaatattcagtgtcactcaaaattggagcttaggtcataaagctgtctctaaaactgtaaggacttgtagagagggcctaattacatttagtgtttttgaaatacagtgagttacttatattaggcatccctgatgttttatctttttatttgttatatttgtacattcttttaaacttaaaataaaacaaagaactatcatactttgcgtacaagatatggatcagctggtggtagcaccttgtgaattagtgtttaaagtccataagcatgattaaatcaccttttcattttcatttgtttttaatgaagctttccatttcaaaatcagtgcctatactctcttaccttgcagtaggaaagaaaattttgttttctcataagctagaaaatgagcttctagtggatattattgcatccttgcaatgaaatcaaagcaggttctgattcaagacctttcaatgactgatttgtgggtcaaagatttgaacctgagtctacccagtatgcatttgctcagtagttgggtaggttctaggaatgccagaaggcaaatgatatagctcctgcttccaaatgaggagtagacattaatgatcaataataataataataatatacagatagcactgattctttgtttagacagtggaacatagtgaaggaactataaagtgccctgcttatttgtaacattttccattcctagacgcaccacgtcatacatttgctgaatgtatgaaaaggttattgaactaatgcataacatttgtttattacaaatgttacaaatgttacagacactagagatatagcagttagcaaagcagacagaaatccctattctcgtaaacaaatgatttaggtgtaagtggaatcaaggttgatgtcagagtccagggaaagtcacattctttgaccctccctgctccctgccttccataaaggtagtgtatttaatatatgtagaagaaagttaaaaacaaaacaaaacaaaaacacaaggtgtccttgaaggggaccagaagctgcaaaatggtagcatgtgtttaagcctactggctctgctttggagagtaaggagagtctagagactgcctcgcacaaagctctttcaaggtctaggctaccgctttcccagcaagtatacagcttcaattgtgttcaattcactgctttcagggatggttctccatggcaaacgctctgtgaagggtgacctgctgggtgtgaaactgctgcacgacttcctacttcacccattcatctatccgagttttcacggagtccaggagaaagtataaaagttaccttgaggagcaggagagtggaatggttaagactgtttggaatctgaccccttggatttgcatcctggacacacagttgtgtgacctaagggaaaccacttaaactctttatgcctcaatttgcttctctgtgataaaagaataatatgacctgtgtcctacagtagagaataataggtcctagctcgtaaaatgttctcattccatgacacttaaatgagaaaatacgtgtgtggaagtgaccactttgctatatacagatattttattatcattttacaatgccattattttgttccatagtcaaaagtataataaaacaaatgtcaatttgtcttattctaatcctataaagtcaattcaaactagtattttttttaaaaaaaactacctcttaaaaacctggatataataagtagttgaccaaatccaagtgttactgtttgcggttaggtgtcagttccaattgtatagattgggtgataaatcgcctcatgaccccctctttctaaccttcctcctgcacctgcttctcctctcactgggctgcagattgtcagcaggccctgctgctaaggagaaagggggatctacttcaggacctagggcttgtgtctgagatctggagggcctgtagccactcctcagagtgttggcttttgagctagtcatgtccaactgctggctctctttatgtgtggcataattgatggcctgaaagtccctggtggcagatcacctacagggtgcaataacctttcccacctcacacagtgcttttgccttgcctggcttctagcagactgaattcacaaatgagtacgttcagtggcttcctgagctctaggggatcctagccagtacccctctgagctataaaggaagtgaagggcaaggagcaaagaggggaactttggctctctaaagagcatgtttttccgctgtgcattgctggctcctgagattggatgtgtaggtcctgctgttctgcaaacttgatgacaattcaggaccagtcttgttggtcataagtaccctcaaacctcaagggagctatgtttaaaattacttaacttcctatctcccgggcgtaaaaagggggaaaggaacaatgtgcaatactcagaattctgtcatctaatgtagcagagctcgattctttctctttcccagttacttttacatttctcgacagcaaaatacagatccagctctgtctcatttgtcccctagtataggtgagaaatcaagccctgtgccaagaccccctttgctctatgtattttggtatttggagtctttgtttctagctaaatagtagcaattcaaacacttttgtttgttcttggttgggggtgggtggggggcagctggtggtcaaggaagctgggaaagatttattttattgatattttacatggacatgttacagtcttacaacacaaaacaccctgaacttggtaagcacacaataattgcaagcaattattagccattatattcaaagatctaaacaaataaggctcttgcctaaggtgcccacaaattctcagatgtcagtaataccaaatctttcattatagtctctgcatggcaggacatgtagacattacaaaataggaatgtccttgtctattatataccaatagggttgccaaatttagcaaacaaaaatacaggactcccaggtaaaattaaaattcgaataaacaaagaatatttgttaaagaatacatatgtccaattcagatttataatgtctgatgtttttagtatgtcccaaatattgcacaggggacctgcattttacctgaccttcctgtgttcctaccacttgtcacactccactgactttgaaacggttccattttcccaaatgtgaaggctgctctcagttaccacatcgagccaacactatgtctatcctaggctaaacaaccaccttaaaaaaataaaaagggtaagtggtgagtgggaagggggatgtggaaaatcattcatattaggcctctcatgtccacccatagaatcaaagtgagtactttttcaaaaaggggctgaaataggaaaatagtatctgcgttcctgtgtctgggtctgtctggttctaaagaatgttcatatcttgaagacttagtacaacctatgtttacttgggaagcataagaattgtgtcaaccctttgaaagacttctaattaaactgctggagctttgatgtcagaatttgagattattattacatattttaaaaagacccaatttcatgtgccactaacaagaaaaaatatgttggcctttacagacagttactgaatttatttcaaaatacaaattagtaccactcgataaactgaatttagtgcatcaatctcattttagaaaatgtactcttacctggaaggggaattcctatctttctggcttttctgttaacggtgaccatcagtagtattggtttttggtgtaaaatcaatgattatatgttactccaggcagctgctgaatattcaaaagatagtaaatggtttcagataggagtattttatgagagttcaaggagagagaaccaacatatgttgagtgtctgttatgggttagagaacacgtgcttcacatgtgtttctactctaaccaacaacctacagagggtgatcaaggtaagttattttccttgagtgataaaattgtctgattctgaaagtgccttatctaatataactcttttttgattttccttacagccttcacctgcagttactttgcttttcaggactctgagcaaaaatctcacacttattaactttacttccaactctgataatatatgtggcaatttcttatatagccaacattttttatttcttctgatggggttatcataagttcttcccattattatcttcaaaatacattttaaataaaatgatgctcatttatttgtggatatctaacccctcacctgtactatgtatttaattttatgtttaaaatgtaaagaatctgggaaattaaagagttcaacctccaacccagtgaacatgtcatatggaaaacatacttctatcttaaccttttagtggtagaacgatcatgagttttcgaggcagtttattcaatagagagcagtttgcaatgaagtctgtgtactaagctggtgttacctcccggaaacttttcctcacaaattctagttctgccttctagggtcgcataaatcaatttaaattctcccctcacccaacccagatgccatttgctaaactgtgtaagttttcagtacatttatagcctggaattcttactatctgatacccaaacagaggataatttttttttttttttttttttttttttgagaaggagtctcgttctgtcgcccaggcgggagtgctgtggcgcgatctccgctcactgcaagctccgccttccgggttcacgccattctcctgcctcagcctcccgagtagctgggactacaggcgcccgccactgcgcccggctaattttttgtatttttagtagagacggggtttcaccgtggtctcgatctcctgacctcgtggtccgcccgcctcggcctcccaaagtgctgggattacaggcgtgagccgccgcgcccggccaacagaggataatattaaaaatggttttgaaacttatttctacacaataaggaaaatcatacaaaagtggcaattcattacagagaaatttaagggataaatatgtatttccttatatatgtatacacatatatacatatacaaatatgtatgtgtgtatgtatgtgtgtatttcctactaacggcaatataaggggaacataaactagaagcaaagtacctctctattcagttgtctcttgagtaattctccctctgatatgtaggggactagaactaagtaagtaagtagccaacatttctatgttgggtttaagccatattgcatccataaatttcataaatgcaattccataaatggtatttaaatttttttttcttgagaaataatcttatcaaatattcaagggttttctttgtaacacaaagcacatacagcatagtattatacaactgttaatccatctgcttttataatcaggctgtgactatctctcccgttccacagatcatctttcgtaagatcagtgatgtgaagaaagaggaggaggagcgcctccggcagaagaatgaggtgaccctcagcattcccgtggaccacccagtcagaaagctcttccagaagttcaagcagcagaaggagctgcggaatcagggctcaacacagggtgaccctgagaggaaccaactccaggtagagagccgctccttacagaatggagcctccatcaccggaaccagcgtggtgactgtgtcacagattactcccattcagacgtctctggcctatgtgaaaaccagtgaatcccttaagcagaacaaccgtgatgccatggaactcaagcccaacggcggtgctgaccaaaaatgtctcaaagtcaacagcccaataagaatgaagaatggaaatggaaaagggtggctgcgactcaagaataatatgggagcccatgaggagaaaaaggaagactggaataatgtcactaaagctgagtcaatggggctattgtctgaggaccccaagagcagtgattcagagaacagtgtgaccaaaaacccactaaggaaaacagattcttgtgacagtggaattacaaaaagtgaccttcgtttggataaggctggggaggcccgaagtccgctagagcacagtcccatccaggctgatgccaagcaccccttttatcccatccccgagcaggccttacagaccacactgcaggaagtcaaacacgaactcaaagaggacatccagctgctcagctgcagaatgactgccctagaaaagcaggtggcagaaattttaaaaatactgtcggaaaaaagcgtaccccaggcctcatctcccaaatcccaaatgccactccaagtacccccccagataccatgtcaggatatttttagtgtctcaaggcctgaatcacctgaatctgacaaagatgaaatccacttttaatatatatacatatatatttgttaatatattaaaacagtatatacatatgtgtgtatatacagtatatacatatatatattttcacttgctttcaagatgatgaccacacatggattttgatatgtaaatattgcatgtccagctggattctggcctgccaaagaagatgatgattaaaaacatagatattgcttgtatattatgcagttgactgcatgcacactttacatttatttataatctctattctataataaaagagtatgatttttgttacccaaggcaatgtaatatttgaagaatcagggtccaacctgccaatgttgccatgacaaatttgatctcaggctgagtatgtatatcgagctatcattttctcactgttctgttaagttaaaagtatagattaatgccaaggaagagttcagtcttttaaactattagtaccatgttatgatctctttccataggatatttttctgtaacttagtgttaggttcttttcccctacaggcagtgtttgctccatttaaatgactgtttagttgcctaagtcagataagagtgtgggatattgaaaacttattgctatgggttttgtgcatgaattacatttttgatcaactatacctctcgttttttaacattatacttagatagtaatcattagctcttatgtaaggaaatccctactccctccttcttggagaacagctgccatcttgtaagctgacattatcaacatcataaatactaaactattaatatagagtatgttattatagaaacactgcaccacagggtataagggccttttgacaattcatgtaagagatgctgaatttccaaagctgataaatgctctaaatttgtatttccaaaacatgttcaagagtgacattgaaaggcttgttagcaaagaaacatacaaaaaaaaaagcatttaagtaatcatatcaaaatgctaactattatggtataaaataaaaaagaatgtaaacagatagataaatttttgtggcatgtatataacttagaaagaatgaaacactggtacggattgttgacacatgaatcctagtgtttgtagtgataacacatgaaatgtggtaaaacaaacaaaccaaccaaccaagaagtagacattaagttgctcgactcagataactgcttttctatcattttattgtggttatagttttttaaagctttttgcacacacttctactgctggacttctgctgagttgattcaataagctattgtggctcaggcaggtccatttgtgaaagggggatactaaagactgaattttagtcttttgaattcaaatcctctttgtagaaagtgcctattatcaagtttttaaaaaaagtcacaaagagttgtcctgtatatagctagtcccttaaatgataaggattgagaataaaatacacattcacttgtaagaacccaggagaacttatttcttttgactaaactgtattttaggaagtcgttcagggaagcatacttttcagtcagtgcatgcacagcatttaatatggggagcaggggagttagtgtttgcatgaagttgaaaaaaatgtgtgagtaatttatatattacgggaccatctgtacatatatgttaacaatatgcaaaagatgatggcaaaatcgaaggagatatcttgatctattatacccatttgtatgagcttttctatctcccagtattcccaaccaaagccactagaactgaaagacatgttatcacattcagacttgagaagtgcaaaacagtgatttataaaaacagttgctattttagaatttctattgaacttcacatgcccacaagatgtgcctctttaatctaggagtctcaaaacatatgagccatgggctccattttcctttctttatgcgtataacttccattaaccataatggaagttttcaggggaacacgtctccatgtaatgctacaatatctacctaccacaaacacaagaaaatgaaataattatggagtaaagaatcagccttgaaattggaattttgttgctttcatggtgaggatgatatctttttcgtgacctctgacatttattgaatttcagggtatttttctatttgtttaagtcaagtttggcttaagcttttaaaggtgaatgtgtggttaaaataagaatctgattatagaagttgttagtttaactttagccagtgcttcaaaactaactattggtgtaaagctataaaagaatgactgtgaacaacatgatgatttgaagttctaattcatggctttgcatattagtggtgcaaatatttactgtgttctgacattgacgtagagtttcacctaatcgacctacaatgttattgttcatatatgtgagaaacataatggttttgaattactccagattgttaggaaggagggaaagtatcaattgtttaattatggtgcagttatcatagtgtcttttcagccatctctgttctctgtgtgcatgatatgaagaggtgctgaatgcaccctgctgttttcagcaggaatgcatgttttcagcaaacattgtatatagagtagtcttttaggttcccagattccacaaatcttagcagttgaatttactcagatttgaatgaagggagaatatttgctttaatacatgcaataatgataaaatcatgttctatgttgcctcaactagcacatagacagtagatgctcttttgaggaccagataactgcatgttttattcctacactgtatagatgctcttggtgcatccagaataaaaattttaatattatatttctaaataatatattaataggagtaaatggatatgtattagaaatccaaacattttccaaagcaatttacacaccttcaatatttttctatgatgttattaataggtaagatcagatgctgtatcctcgacaggtggttgtaacaaaatagcaaaagtcaaattagaatggaaatgtgagtgatgtatcataatggcaggttttatcagtctgtatcaggatattgttgcactaaatgtgatctagcagatggaagagattatgataaaaagcaaataggcacacaaaagccagatgacaataccaaagctatatgaatggtactgaaaatggttcaggcacagtggttgaattgaatgacgtggttgaatacaggcccatgcttcattgttaaaatggaaaatttttatgacactagttgcatcttgcattaagtataggactaaaaatgtcctaagtattttttacaaacaactttatgtatatcagagaaaaaaatggaaaatctggggtttgaaattgctctagaaaaaatgtgtacttctgttgtactcaacactttaataggaaaattagttgtgaccgctaactaaagtaccattatcaaaattaaccttattggagcccaaatgaaaatcacattttcccttctgtttaaggagattttgttcaccctgtgatatctggtccatttgatatcttattttaaatagctaaagtcatttggaattttttttaatattagccttcagagcagtgactgttttgaagtgtgcagtggcagatatttgtgaaattattcatcatatttctaatgaattccactatcttgtataatttttatcttttaagcaattttctatgagtttgttttccaaaattccatgtaggtaatgagaacatttatctagaatgtgcatatcatacatggataactttcaaatatgaatattttataatcatgtgaatgttgtgctataattttttctattaggtgtaaaagtatttctcttctcatcttaatggaaagggggaaaagacaaaaacagtcttttggaaaacaccttaagtcttagtatctgagctttgtcttgtgttctgaatttagctttaccacaaactagaagtgtaattatgggcaagttaacctttcctagtgtaccaaatggtaccatttccccgccaataaataagaaaacaaagataacagctgttgcttccttatatcaacatgctattggtcaatgaaaaaattatctttcttgcaggtgaaaatcacattatgacaagtgatcactttttcattctttcatagaagagtatccacgatgtactctctatcaaaatattcttctagattttagaagagatttcagggattgacggtgatgtgatttttatctaaatattcttttaggttttagaagagatttatctggtcagaggttaatggagagaggcatagtttgctagtggcaggtaagcataaaacttcatacttatgtgggaatttagaactacaaatcaaataaacgtggaaagaatgaagctcctttgacagaagagagagagaagagaaagataggtaaattttgtgatttttcttatttctacttaatcatactgcttggcagaaattctcaattttgtgaaaaaattggtaagtggccaaggtatagagtagttcaccaatgtatctatgtaacaaaactgaatgtgtaccccttaaatttatacaaataaaaactagagtagttcatccttcaactttttatattaaaataatcatgacctgttcaagatatatgattccacatgggcagacactcttataacaaaattcttaactatgtgctatgtgttgtaagttttggcctatattctgacttgagattttctatcacttcatttgtaggataagacccctgtgtttgcattctttatgagggtcaggaccactgaggatttggactgggaactagaaagatgatgaaggcaagggttgagaaaagactgattagaatctatctgcttctttactcttaggcttagaagttaaataagttaactaagcttatatttaccaaggtctcactatgataagcattttatttaggttatcaaatttaattcttgcagcaaccccatgaaggtataggttaaggaacttgtccaggatggcatacttgttacatggtaaagttgagtttctaacacaggcagtcagaccttagggagaaacctttattttgtagaatactgacattacaagaactatctagttcaaccatctagtctaggtttttccagacacatacttttaaagatttcttaaaataattcttaaaaattgcactcgataatgtgaatgtaaatgtttggtttttcttgataggtcagagtcaatgacagagtttgaaatcatactgtcttaagcaaaaggtgccctgtcccaacagtggaattttcctttacttctcctaacagttgaaagacatcggccaaagtaaactgtcaaatgtggtatgtttgatatatggtcactggtatcaacattttcttttccagttgaattttaacctaaagaggtaatgcctaatggttaaggaaagcaagagtcattcaggattttttttctataatttctttttctttttaatagtgggatttggatgagactccagaatttatttttaaaatttattttttgactcattgggttttaagtagattattcagatatttttattgattgcactgatgttggcttcttggccaaaccactattaaatacattatccaaatgaactatttctgtttagaatggcaacttgtatccttatttccaaaattaatgagctcatagtatgtatatttacttcagagagtttcaataattttctctaatgaaaaaatgttaattttctgaatgtgatttatttgttctaccctttgagatttctaaagcaagtgtcttgagataaggagaaaaaaacaagatattacaacactacatgctggaatcttcagcccaaaccatcttgttttcacttggctaataactgagccagaggtaatcatagaaaggaagaatcctacttttaaaataatgactgtgaaggaccccactgacaccatccaaagctttttatagtcagctcacttccatcctggcttttacattaccactgcatgattatttaaatgaggtcatgtcttgtactacttgtaaaggcacttggtcaaagaagagtaaaccaaaaagtgcagcttatgaccagagttataactgaggaaaaaggagtgtggagaagggacagcagttgcttccttttaatgagttttctgtatgtggtgccttttaaatagcttttgtttatttgtttttaagatgacacattgtcattaaggttttaacaaaaacctttggaagcagtttgaaagcttgtcaaatgctggggccttctttagaaataagtgttctcccaccaaccaatgagtttagaacctctggttctgacctacaaacccaatcccctaagcacttggctggttgggctgcattttgatgggaggaaacaaaaagatctgatcactctctctcattcatgcggaatcactgactgttgaatgaccaaagcagtcaaagccaaaatattcaccttgaagcttcaataaaccagattgagtatccataataactaatttaagtaattttatccccattctctgctaaatcatatttcataatataaaatgtaaccacttccctctatccaaagcttttggtcagactctccattgagttagagaaattggactttggcaaaaagcaacataaagattattgttgttcctagaaccattgttgccatggacccctcatttgctcctcaactttttcaaccaaattatagcgggaaagattcctgatgaagccaagactgcaaacaggaagaatacctagctagtaaactatgcaaaatcacaacaaagattcatttataattccatgttacagtgtttgatagtcctaagtatttaatattggtatattatgtcacagccatgaactgtcaacttacacaaaatccaaacgcactttcatttaaaatcaagattagcctatttcattttcaggaaaaaacagttgtcagaattgcttttttgacctctgcagggatgttttcacattgctattcttatgaccctttatcagagagggaataagtgtagtgttcactttcatctccttagggttgactgcaccagcatcttccatcaagcagtcgccttccaccttagaacctgttcacagttaataaagcaagggggaatatgcatttcatattaggaacagatttcttaagtgattgttatgaaaagtggaaaccagtttagaaccatttttttaccctaaaacatccattgtagtttgttgaaagagcaatgacttttagaagtgcttggtactcaaacaacacaaaatgtgcagattcacgatatattgaaaattatagagttctttttagtctatgttctagtgactttgtttacactagttgtggcattttgtatactacaatgtaaattctactataacactaatgttactatgggaattaattttgcaacttcttaaatgtttttgtcactgcaaccatattggtgagatattgggggtattaaaaatgcctctgcctttaagggttaattcaccagaaataattgattcatgcattgacaaaggaaacaatgcaaaaatttcatgtgggatgtttttaataccattatgctaagcagtacttgttggcttttttcaaaatctgattcatgctaagcagatccttttttctacttaaacaaagatactgcaatgtataatatagaaattttgtatgtactgttgacctatcacctgactgctgacaggatgtgtgaaaatattttaactttgtgactttagggtcaattatgaaacaattgtgatcaaaattcagttgcttctgggaagtttgtggtgattatcactttatttaacgtttgttctcaaaaaatggtcattttgaaaagtgaattggcaggtggaagcttttagcccaaaagaaatctgggtttcagcacaataaactgtatttcatcagggaggactaactttgctttttttcacactttatttaaatgtggatattttttcatgatacagaataaaatgtgcattttatggaattaatttgaattgggtctttgttggaaattgctattttgaatttagttaaataagtgaaaagctccccaatattaaaacacaacgcaataggtttagaggaaacagtcttttgatatattagaattccaatgttttcttaaactttcataatatttttcctctgataaattgtatcattatggtataaatgataaagtagtattatatcagaaattaaaagtttaagctccaggagtaaatttggttgaattagaatatttctctgtaccttgaaagatagagataatgagcatatctgaataggaatttggagaaatccttattttaaaatgggattaaaaaatatttctctatcaatatttctaaaattctattaatatcataacattattaatttattccaagcagtgaaatttagaggcttaaagggcagaatgtacatggaataaaagtatactttttctcatgttttgaaaaaaattataaatggctttgccaaattcctattgaaaaacaagagctgaatatgtaacataggatgtctgccacacgagaactgcagatttttcttctaactaaaaaacaagtttgaggaacacttttttggcacatcactgaaaaattattcatacctatggctacgtaaaattacatgttgattacagaaccaccaaataaagcttcgtctttgctatggctgtattagaatataagttagagcattctagagttagctttcaattatataggaatcaaggacatgatgatcacagataacaaaatgaattgtcaaaatgaagtgaaactttctacacaaatgaacagtaattaatgctttctccattttttgttgattttcctcctcttttttttcttctttccttactcacacatgcacatgcacacacagtcaacaataaattgcaacctttccttctaagttccatggtaataattaagaaagataccaatttttggctgggtgaggtggctcacgcccgtaatcccaacactttggaaggccaaggcgggtggatcacccaaggtcaggagtttgagaccagcctggccaacatggtgaaaccctccctctactaaaaatacaaaaattagttgggggtggtggtgggtgcctgtaatcccagctactagggaggctgaggcaggagaatcgcttgaacccaggagttagaaggtgcagtgagccaagatcatgtcattgcactctagcctgggcaacaaagagaaaactccatctcaaaaaaaaaaaaaaattcaaaacatgataatacatattgtagatgtgtgaggaaatactcaagtgccaaataccattacaagcagaatgagaagtttttgtcccataggatgttttcttcagggaatgtgatgaaaaatagaacatgctttaaccttccaaccttcaaacttgtggttagctccttctattcccacccagttaggaggcttttgcttcctgtaagattgttgaaaacactaagttttcctatatcaagttgggtacattctgtttaatctaggaaaatcagtgtaacatgctcttaatttgattaaataaagatgtgcccaaggcgagcgatgcagggctgaccttatatagccagaaggggcattggggatgaattagcaccatgcctactttgagaaatgaagaaaccaagaattggaaagggtaggcaattctccaaagttgtatgtatagtgacaactttggaaattaaagttgggagttgggaggagttgggattaaaattcagttgtcttgactccaagtccaatgtttcttacgctatatcacatgccatctggtttttcacagtgcaaaacacacacacacacacacaaacacacacactctttagctaatgctactgaaagtgttgctagtctcctctctgaatattgcagaaaggatagttatgtgttcaactctg

SEQ ID NO: 1130 - DNA, 2967 bp, Homo sapiens
atgccggggggcaagagagggctggtggcaccgcagaacacatttttggagaacatcgtcaggcgctccagtgaatcaagtttcttactgggaaatgcccagattgtggattggcctgtagtttatagtaatgacggtttttgtaaactctctggatatcatcgagctgacgtcatgcagaaaagcagcacttgcagttttatgtatggggaattgactgacaagaagaccattgagaaagtcaggcaaacttttgacaactacgaatcaaactgctttgaagttcttctgtacaagaaaaacagaacccctgtttggttttatatgcaaattgcaccaataagaaatgaacatgaaaaggtggtcttgttcctgtgtactttcaaggatattacgttgttcaaacagccaatagaggatgattcaacaaaaggttggacgaaatttgcccgattgacacgggctttgacaaatagccgaagtgttttgcagcagctcacgccaatgaataaaacagaggtggtccataaacattcaagactagctgaagttcttcagctgggatcagatatccttcctcagtataaacaagaagcgccaaagacgccaccacacattattttacattattgtgcttttaaaactacttgggattgggtgattttaattcttaccttctacaccgccattatggttccttataatgtttccttcaaaacaaagcagaacaacatagcctggctggtactggatagtgtggtggacgttatttttctggttgacatcgttttaaattttcacacgactttcgtggggcccggtggagaggtcatttctgaccctaagctcataaggatgaactatctgaaaacttggtttgtgatcgatctgctgtcttgtttaccttatgacatcatcaatgcctttgaaaatgtggatgagggaatcagcagtctcttcagttctttaaaagtggtgcgtctcttacgactgggccgtgtggctaggaaactggaccattacctagaatatggagcagcagtcctcgtgctcctggtgtgtgtgtttggactggtggcccactggctggcctgcatatggtatagcatcggagactacgaggtcattgatgaagtcactaacaccatccaaatagacagttggctctaccagctggctttgagcattgggactccatatcgctacaataccagtgctgggatatgggaaggaggacccagcaaggattcattgtacgtgtcctctctctactttaccatgacaagccttacaaccataggatttggaaacatagctcctaccacagatgtggagaagatgttttcggtggctatgatgatggttggctctcttctttatgcaactatttttggaaatgttacaacaattttccagcaaatgtatgccaacaccaaccgataccatgagatgctgaataatgtacgggacttcctaaaactctatcaggtcccaaaaggccttagtgagcgagtcatggattatattgtctcaacatggtccatgtcaaaaggcattgatacagaaaaggtcctctccatctgtcccaaggacatgagagctgatatctgtgttcatctaaaccggaaggtttttaatgaacatcctgcttttcgattggccagcgatgggtgtctgcgcgccttggcggtagagttccaaaccattcactgtgctcccggggacctcatttaccatgctggagaaagtgtggatgccctctgctttgtggtgtcaggatccttggaagtcatccaggatgatgaggtggtggctattttagggaagggtgatgtatttggagacatcttctggaaggaaaccacccttgcccatgcatgtgcgaacgtccgggcactgacgtactgtgacctacacatcatcaagcgggaagccttgctcaaagtcctggacttttatacagcttttgcaaactccttctcaaggaatctcactcttacttgcaatctgaggaaacggatcatctttcgtaagatcagtgatgtgaagaaagaggaggaggagcgcctccggcagaagaatgaggtgaccctcagcattcccgtggaccacccagtcagaaagctcttccagaagttcaagcagcagaaggagctgcggaatcagggctcaacacagggtgaccctgagaggaaccaactccaggtagagagccgctccttacagaatggagcctccatcaccggaaccagcgtggtgactgtgtcacagattactcccattcagacgtctctggcctatgtgaaaaccagtgaatcccttaagcagaacaaccgtgatgccatggaactcaagcccaacggcggtgctgaccaaaaatgtctcaaagtcaacagcccaataagaatgaagaatggaaatggaaaagggtggctgcgactcaagaataatatgggagcccatgaggagaaaaaggaagactggaataatgtcactaaagctgagtcaatggggctattgtctgaggaccccaagagcagtgattcagagaacagtgtgaccaaaaacccactaaggaaaacagattcttgtgacagtggaattacaaaaagtgaccttcgtttggataaggctggggaggcccgaagtccgctagagcacagtcccatccaggctgatgccaagcaccccttttatcccatccccgagcaggccttacagaccacactgcaggaagtcaaacacgaactcaaagaggacatccagctgctcagctgcagaatgactgccctagaaaagcaggtggcagaaattttaaaaatactgtcggaaaaaagcgtaccccaggcctcatctcccaaatcccaaatgccactccaagtacccccccagataccatgtcaggatatttttagtgtctcaaggcctgaatcacctgaatctgacaaagatgaaatccacttttaa

SEQ ID NO: 1131 - protein, 988 aa, Homo sapiens
MPGGKRGLVAPQNTFLENIVRRSSESSFLLGNAQIVDWPVVYSNDGFCKLSGYHRADVMQKSSTCSFMYGELTDKKTIEKVRQTFDNYESNCFEVLLYKKNRTPVWFYMQIAPIRNEHEKVVLFLCTFKDITLFKQPIEDDSTKGWTKFARLTRALTNSRSVLQQLTPMNKTEVVHKHSRLAEVLQLGSDILPQYKQEAPKTPPHIILHYCAFKTTWDWVILILTFYTAIMVPYNVSFKTKQNNIAWLVLDSVVDVIFLVDIVLNFHTTFVGPGGEVISDPKLIRMNYLKTWFVIDLLSCLPYDIINAFENVDEGISSLFSSLKVVRLLRLGRVARKLDHYLEYGAAVLVLLVCVFGLVAHWLACIWYSIGDYEVIDEVTNTIQIDSWLYQLALSIGTPYRYNTSAGIWEGGPSKDSLYVSSLYFTMTSLTTIGFGNIAPTTDVEKMFSVAMMMVGSLLYATIFGNVTTIFQQMYANTNRYHEMLNNVRDFLKLYQVPKGLSERVMDYIVSTWSMSKGIDTEKVLSICPKDMRADICVHLNRKVFNEHPAFRLASDGCLRALAVEFQTIHCAPGDLIYHAGESVDALCFVVSGSLEVIQDDEVVAILGKGDVFGDIFWKETTLAHACANVRALTYCDLHIIKREALLKVLDFYTAFANSFSRNLTLTCNLRKRIIFRKISDVKKEEEERLRQKNEVTLSIPVDHPVRKLFQKFKQQKELRNQGSTQGDPERNQLQVESRSLQNGASITGTSVVTVSQITPIQTSLAYVKTSESLKQNNRDAMELKPNGGADQKCLKVNSPIRMKNGNGKGWLRLKNNMGAHEEKKEDWNNVTKAESMGLLSEDPKSSDSENSVTKNPLRKTDSCDSGITKSDLRLDKAGEARSPLEHSPIQADAKHPFYPIPEQALQTTLQEVKHELKEDIQLLSCRMTALEKQVAEILKILSEKSVPQASSPKSQMPLQVPPQIPCQDIFSVSRPESPESDKDEIHF

SEQ ID NO: 1132 - DNA, 73038 bp, Mus musculus
gaatctgttccacacagctgctatgtctaggaggtagcttagattgatcttcatggccggcccctgtctcatggtcttcatttctgaactttctcaggaccaggcctgtgcttttatggttctggttctggagatgtcttgattctgcagttatcttcaaggaaacatttgccaagtggtcatgtagggtgtaggcatcccagtcccttggactgacccttcctttttttttttcgagacagggattctctctatagccctggctgtcctggaactcactttgtagaccaggctggcctcgaactcagaaatctgcctgcctctgcctcctgtgctgggattaaaggcgtgcaccaccacgccagcccctgttctttttaaaattaagttcatgagctggagagatgactcagtagctaagagcactgactgctgttccagaggtcctgagttcaattcctagcaaccacatggtggcttacaaccaactgtaatggaatctgatgccctcttctggtgtgtttgaagagagcgacagtgtactcacatacataaaataagtatataaatctttaaaacaaacacaaacaaaacaaaaagcacctgttgttcttgcagaggacttgggtttagtacccagcatccacatggtagttcactaccatctataactccaattccatgagatctaaagcgctcttctgacctctgaggatactaggtacatacacacacacacacacacatacacacacacacacatacacacacacacacacacacacacacacacacacggtgcacaaacatgcatgcaaagacaaaaacaaaaaacagaaaccacaacagaacaacgataacaacaacaaaaaattaatttcacttacttgataacctagaacacaaacttagagagggagagagggagaaagacagaaacagagaaaaagggggtaggagagatattgttttttaagtcagggtgacatatctatctcctcaaacatacaccacacctatggtaaaacattcataatcataacacagggtacagtagaactacatgtacccgttagctgaaccaaccgctacttggtgatctctctccccctcccttcccctcccctcccctcccctctaagtattgaactcacagcctcatgcatctatatatgcaagtgctctgaatacatcagccctgaccctgcttctctctatatacacacacacacacacacacacacacacacacacacacacatatacacacatatatataatacgtatttgtctctggactcagccatatcctggtattgtacatctatggactgtgcaatttgtcttgtagaaaggatcgagcttgccttggggtggggggaggctgacctggtatactgagtttagagttgtgagggccatgtgatgttgcagtccttcaatagcaatcaaagctcaccctcaaaatgtatttttaactcatgccccgaggaactagaaattaatgacttgcattatttacacaaagacgttcactcttgatggcagcaattttttaacattatgtttgtctaactctgtcatgagacataagtcaaatatttaaggtttgaacagggtgattaagccaagagagttatctaagtcagcaactgctaggcaaacatatttctccttctctcttcttgtaatgaaatagaagagaactggttggggggggggaggtagattttaatctggtctttaaagcaaaattcaaactttaaaatgtgagaagatgaaaaactgagtcagtttggtaagaatttaccacccttagcaatgtacacgcaggtcctctggcacacagagaaatgctcagaggttgtgttcctcagcctattggaaagggtccacctaccatgcctcagtctccatccgccctgtggtcttattgaacggctgtccctaagggtgtaaaacgtggctggaaggttttactcaattatctggaagtccttctgggatccaacagtgaaccctctggatttttgaggcgctggcattattttccagcagggctgcactgcagatatccggccccaggcttcaagggccttgcattggtattcaggcccctccagtgggctgagggtcctgcagtagtttctgctctgcttgctgaggtgtctttcggtgggtgcagcaacaacatcccccagggtctgtaagactgccatctccacctgcctgcaaccaaagaatgacctttggcacagacctttgtcaccttgctgaagctggtttaataataggacagagatcatggtgggaggtagcgtgcttatctctgggcagtgagtggcatctagttactaaaggactgtgctgtattctgtctggccagtgctgcacacgttacagaaaatgcttggtttaggcagggcaggaagtcatcccttagccccagcagacagaccccaccatgctgtgtctcccttttcccagataggttgtatgtgaatgtgtgcttctctctatgaaagcagtggtgacccttaaccacttttattctgcttcgacatatactccaggaactgtgctgttcgttccatatagggaaaacttaagaaaaattattcacagtagtgaagaggtgggaagaactcgagtgcccatcaggtaagcgagacgtggtccatcccatggtgcaatgttactggctctgaaaaggaaggacactctgatataagctgcatcatggatgggcctccaggacattgtgccagctttacgaaaggacagaagtgcatcttcagtcacgtggtgtttctagagtcactgttatcatagaccaggaagaatggtggggtcaggggttggggagctgctgtttcttggggacagagctgtagtttgagaagagaaggtgctggtattggtgatgctgtaaagctgtgggaagcatttcaggccaaagtatgatgttaacatttattctattggtatttttttctttgcaattaaacagaataaattattttaaaaagaaaaaaaatggtggtgcatgcctgtaatcccagcacttgggagtcagaagcaggaagctgaagtaatttcagaagtctgcatggtctacatattgagtgccaggccaatgatgctattcattgagatcctgtctcaaaataagcaagcaagcaagcaaacaaacaaacaaccccccccatgaaaaccccctcaaactaggaaatagcagctaaatgaccaggttaatttttttccttttttattcattaacatatttgagtagtgtgggggcagggatattccatggcatgcatgtagaggtcagagggcaactttgtggactttattctctcctacctttgctcgggttggaggatcaaactctggcttgagtagcaagtgcctttaccaaccaactaagcaatcctgccaactctaattagaagttcttaacaatcacccacgaggtgccagcaacctgtggacagtgacctgtggccaactgttgttagtgtgacatgtgacaactcaatggccacagttactctgcaaggagggattttcaacttggatagatatcagtcctgattctgacactgaatgggttcatgaatcttacctccaaagtctccttgaccttgaccagcccacagagggaggggactggcttggtcaaagggtcagcttggcctgatgttcagtcaaactggaaggagaatgggttagtctatgaagcttgaatgtaagaaacactgagtctagagcatgcaggaatgggcactatgtgggaagagctggctctatctctgtagactgagacagaactcctactgtgtgcacagccacagctgtgatgccatctgggagctgtgacttaggagtggactgttgggctgaggaggttggtatgggactcaccctgatattcataagccacatttatcttctaggcattccaccacctacacaaatcactggatgccagcatgagcatctattctgaggccaggatgtgcacataaccacctcttcccatcagaatcttctcagttcctaagggcagctcaggcatgtgtcccattgggcctgggcagggcactggtgggcagaggcttcctggcccttccatccattccaggctcctagaacttgtttccttgtcctgaccctgccctccttcttgagcaagtgacttggccaccgtggaactcaaaaaaaggcattatgttattattgtatctatagatgttgtcttcttttccagggttatttgaggctatgaacaaaaagggcttagggtgtgtattagtcagggttctcaagaggagcagaacaaatatatgtatatattacaggcacacataccacacaccccagtgtaattaaagagcttcaagtgttcctgggataaattcagtgctgggctgctgtcctgctgagagagaaagcactgaccttgaatttaggcctcctccctacccagtgtggttgtagacattgttagctctatagccacattggggttgatagggaagataaggctgggactcttcctggccttggtgcaggctggccaccttggagccggatcattatctaggaattcagcttctagaaattcatcccttggggccaggcacctttgtaatggactgggggccagataagtttttcttttcttttcttttcttttcttttcttttcttttcttttctttttctttttctttttctttttctttttctttctttctttttttaattctttgtcagctttgttatttaacaaacatttgctggcttgcctctttcttttgatatgtcagaaataaccctgttatctccttgtcaagtaagtctggaacttgcagactagcaagcagtcgctttttgtgcttgggcatggtgcagggccctggattaggtggttctgaaatctgttagaacaaaaagcacagacttgggcgttgaggttagaaactggaagaatagttcttttcttatttatttattttatgtgtatgagtacactgtagctgtacagatggttgtgagcctttatctggctgttgggaattgaatttaggacctctgctcgctccagccaaccccacttgctctggcccaaagatttatttattattatgaataagtacactatagctgtcttcagacactccagaagagggcatcagatctcattatgggtggttatgagccaccaagtggtttctgggtctgagttcaaactcaggaccttcggaagagcagtcagtgctcttacccgctgagccatctcacccgcccagttctatactttttaaaggctgactcgacttccattttcttcctgagggcagctcaagcagagcgaggcccacttctacagtctgaattctgtacatacaacccctgttcccgccagatcaggtcaaattacatgaccatctcctgcactggatgtgtcttccatatagtcctcaggtctggggtttccatttcaaacctcaggtggacaaaattgcaagcacctcctttaaccttcagcaaggtcacaagggcagcacctattaacctgtgtggcaatggctccaattttcaagactgtggatgtgctggggaactctaacatttccatgatctgagcactcagtcctctggtctctgttgagctggtgtttctggtccctgctgtacagtgtgtagaggtggctgcaggttatgcatgcccccgacagcctgggaactgggtttgctacaacagggtggaactatggcttggagcagtctcttgcatgtgcctataggtgcctgcccatgcgtgatgtccctggtggagcagctgtttagtctttcccgcttttctattgctctttgtagcatgcacccgtgtacagtggctgtcatgtgcactgggctcccttcttcacccatgctacgggggaacagaaatgtgcagattttcatggagaatactttttttcccccagtttatcctgggagatgattacatttggaggtcacaaagggatgctgaaggccaatttgcacttggcagctgctgctgctgacaaacactgcaagctaggtttctttatcagcctctggaggccacataagggatctcctgcccagctgggctcccatagcttgagaacatctgaacagcgaattagacatgccagtccctacagctgagccgatggccctgagctgatagcagtgatgagcagtgcaatctgagatggtgaccagacagtggcattgaatggccattttgggtgacactctgtgcataccattggtctaagtggaccatattttgcatgaagaaagaatagcattgtggagctggttgcctggaggcagatggaccttaccagagcccaaggttacccctcacagaacagtactaggtggtcccttcctgaccattgctggaataatgtgcattggggaagtctatatgaagcaggctatggccttggtctatcttgatggtggcctcccatcaagaagcattcagcttaggctaaccctcagatgccagggcctatggttgtgggtgacaaagcctagaggcaacaggaagttcctttgtgcctacgactatgtgcatcaaagccctggacctttaaaagacaagcagtcacagctaggagtaggcgttgctggtgtgtcttggttccttgaagctaacagcttgaggtggataataccatataggagagacacatctctacctgtactgtaccgatggtctcagctgtagctgaatatcagtgcttcattaggcctagatggtgcctgtgagcaagggtagacctctgaggctggggaagaaggtgacaagagagccaggcctttgcatcttatttcttgagtggcttaaaagcacttcagagggctggagagatggctcagcagttaagagcacgggctgttcctccagaggtcctgagttcaattcccagcaatcacatggtggctcacaaccatttgtaatgggctgtctgaagacagcgactgtgtacccacatacattaaataaaaaatttttttttaaagaaagctcttcgggggctggagagatggctcagcggttaagagcgccgactgctcttctgaaggtcgtgagttcaaatcccatcaaccacatgatggctcataaccatccgtaatgagatctgatgccctcttctggggtgtctgaagacagctacagtgtacttacgtataataaataaataatattaaaaaaaaaaaaaagaaagctcttcagaggtactggggagagggcctggttgcaagtgttttactgaatcctgtaactcatgtagcatttgtaatcctagcactactgggagatggtgggtagagacaggtgacttcttggaagcttggtggcagttagactaggctctgtgccaagagtgccaaactatcttgaacaaaaggaagaaggtgcacagcacaagccagcacacacacacacacacacacacacacacacacacacacacatgctcacacatcacacttggagagggaggtagggagggggcacaatggaccaagtgatgcacatctcattgcagcttgagaaattttacagtctagtgctcattgaataacatgttctcagagtttcccagtctctaacctctgcatgcgtggtctcatgtcaagaaaaatgtagtttcataggttgagtatttatgcatcagattttggggtcctgtctggagcaggtataaagtacagtttcattccgtttttggtaatccttggagtcagcagaacatcacatccttcacatgtgtagggaggtgtggtagctgatgtactgcctgtccactggttctgtgcgcgctgcttactttctttcaagttaaaatacctggtgcgacattggtcctgaggctctccatactgcgctgatggaaaccttgcatctcaactttgtggggattaaaacattcccataggctactctgccctgttccatgggctcttccttctctaagtcaccaagctcacagggcaccccctccccactcaagctcccagtggacctgagtgtattgacaataatcttccttagcttcaccgggtacagcgttcagtgttgtctgagttcccagcctgtggatatcatgccacagtaatagaccttgctggtgtgcagtcagccagaagaaatggggctgagagacaggcacatttgtaaaaaggactatagctgggcatgtctgtacatgtatgtaatcccagtacttgggaggtagaggcaggaggatcaagaattcagtcatctttggctctatatcaaaatttgaggccaacctgggctatgagaccctgtctttaaaaacaatagagggggagggcagggaaagtgactgggggctatggctttttgtaagatgtgttgggtatgataccagggtctctgaaatggtaggaaccctctcctactgagcctaagtttcaagtgtttgccagtctggagggtgttctgaggaggagaaggtggtcactatttccacctaaggtccagctgagcaggggaaacaggtgatagcccttccctatttgctatggatagctcctggagggaggtggggtgacagtatgatctgagcaagttgtgccctatcccccataggagctggaaactgtataagaggccattcctgagtggcccatgtttcccccaagctccttcctggcagagggcagaaagccggccatactgggtacagttgggctttcccagaaatggcttttctgagttagtttcaaaatgttttattctcatcggtaggatatgcaaatccctttaactcccgtatctcagcctatcccagcggtgtcactggtccggcagctgccttccagtccgtgtccctgattgaactgggccaggccacctggctggccctgttccacaggttgtgagcagctctaggcatatcacctgtgtttctctttgaccatctaaaacagttttgggtgacttgttgcacctgggggctatggctttttgtaggatgtgttgggtatgataccctaacattttagttccattctctcttgaagaatatttgtttccagtttttcaccagtctttcattgaaaatgcacaaggtcctgaaattccggaagatctgtgacttccaccatgtggtgttctggaactctttgctcggatcttcctgtcactactaccttcggaatttacctgcccttggagccaaagggaggaactgccaccctccaagtttgggctgcaagggttccccaggttggatcgtggaacactcctgccagcaggtacaaagagtctcgggcttggctggctaggcctgtcccagagcccagtgaccttcttgggtgggattacttaaccccagggtgcacagcgtcccctgattggccattactccctggcctaggttagcagcctgacctggtcagggcctgggcccagatcaccagcgttggtggagatgaggagctgcaaactgagagaaaggagccatgacctgtggggtggtgggagaagagccccacgggagtttggaatgagaatggaagaactgaagctgtggaagtggtgaatgacaggctcttggagggcgggagggctctgagcctgtgttgtgagtaggaatgggaggaggacgcggtcctgcggggaggaactggtgtctcttatgctgagggaggtctgcatctgtgggcagttcattcagcggtggcctctaggggttgggtttgtgcgtaccgagtccttgagggtacagggctctggcggggcaaccctgagactgtggctacaggggcggagttttaaggggtggagcgtctggtgggcgtggtcgttccggaagcctcccgaccccgccccgggcaaacttttcccgagccgtgggggcgggcaggtgaggtcacgtggcgggcaagggcgggccgggcggaccccgcccctacgccggagtccggcggctgctctggagcagcgtgtggctgcgagggacagcagagtctaacggagccatgcccacgaactttacggtggtgccggtggaggcgcgcgccgacggcgccggggacgaagctgctgagcgcacggaagaacccgagtctcccgagagcgtggatcaaacctcccctacgccgggtgagcttggccgcacctgcaacgggacaaaggcagaggctgggcccttctgctgccgctgggccgctctgactcgttggttggcggcggcccgcgcggcgcgtagcggggcgatgggaaggggtcagaagggccaactggtatctgcctggctcggaggagtgacccgagaccgggagaggattcttgggctggtggtttgttggccctgttcgttcagtttcttgaattcagtgctctgctccttgcttgaggcgcccgctgcatatctccctgttggcctgactcagtcagccctgggggcgcggttcccacctctctgcatggcctgactggagcatcgaggctggagcaccggaaactacttggtttggcaactctgacgggactagggaggagttgcagagctactggaggtacctatggaacgggaaggcccaggtgtctaggtggtacctgggagagctggaggtacagacccctggatgggtgatctcactgacggacagcttcctctgggcaagctttcttttgctccaggatggcccagtgtggtcaaccgataaatccgactgggatcccagatctgcctccactgaccttggaccagccaaacttcccttgggatcttagaggaaggacagaggcccgtgtaagcctggggagggggctgcgcactctgagcgcgggcttctctttgctgctctttgttccttggatccggagctctctggcactttcactttccacggggtggtgatgggcctgggaatctctctccatcctacttctcagcaccctctctgctgatggcaagtcaccttgaactgactgcttcctccctgttccaactctcttctagacctagatcctaataggccctaataggtgagaggacccagcacagacctacagctgcagctggccttgcacctaccccaagttttacattggaggtttgggctccaggttctgggtctggaaggaaaagagggtgcaatcctcaagagatggacggatcttttatatatggcatcagagcttttgctgctcagaatacaggcagtagaaactgcgcttcctctagtccatacttttaggagcctgcattcatagactaggagtgctggcccggaagtggcctagcccaggtccgcagcctgcctgtctcactctgtgaccctctccatgagatgctggactgtccagctttctctgcacagacaaagcattctatgtctcagggctgctgcctggctaaacacataaaatcagttgtaaggtggaggcagaatctagaagtccaaactcagtgtccatcagccagggaagtgtgaagagggtcagcagcatcacagagacccccagagtagagcccccaaagcccttcctggtgcccagtggcctgagacagacaattctacaattctgcagatgtcctatatgattagtgtctcaggcagaggtaattttccttttgattcatttcttgttccctacagtatcaggactctcaagtggtgcctgacgccagtcagggctgaggattcagcttctaggaagggaagtgactgtctggcttcctgaaatttgcactgttaacaagaggacaagcatgcacttttaattccttagttgtcttgagacgaggtcttatgcggccttgaattcaatctgtagctgaagatgaccttgaactcctgactggagcctctagcaactgcttgtattacagtagtgtgttgccacacccacttttgttatgttttgttttgttttttaaatgaattgctggtcaggattgaacctgggcttggtactttgctaggcaaatgctctaccaactgagccacatcctgagtatgtgtgttttaatgatcctttcacgctccaagctgaacttgagtaacttggctgggcttatatagaacttgcattttggtgctctgtatacttaatatttctataatgataattttggaaacttcagccgctgtaccatgacagggatgactttgttgtagtcacagtctgctggggtttgtcctgaactctttgcttttttaaaaatttttagttattatttatttttgtttgttttcaatttttattattttacttatttacattccagtcattggtctcccactccacctctcagtaccccctcccacagttccttatcccacttctctaacctcttgcctctgagagggtactcccctccactccccaggccattccctttcttggggcctcaagtctcttgaagattaagggagagctctgctatatttgtgccaggggcctctgactggcctgtgtatgatcctggttggtggctcagtctctggggggtaagttgagattgctggtcttcctatggggttactctctccttcagcgttttcaatctttcccccaattcaaccataagggtctccgacttcagttcaatgcttgggtttaagtatctgcttctgtctcagtcagctgctggtagggcctcttgggggacagccatgccaggctcccgtctgtaagcacatcataacatcaggaatagtgtcaggccttaatgcccccttatgagatggatcccaagttgggctgctcattggaccatcttgtcctcatttctaacaggagcgccagataccagccaggagtagggaagggatctcatacttagttttttggtgggaaagtcctgtagaggcaggatgaaggcttttcaaaggttgcctgtgtggatctacaccatgtgtgtgggcatcatttgtgtggtcatgtatgtgggtatatgtgtgggctacaggccagagccaacttgcctggtcacaggagtcatctttgaacactgcagccctgccctgtcttgccccctattcagatcccttggtagttcttggaagtaccattttctagagatgtctcctgcgtgttgcttgtgatggagtgagtttggagacctcattaggtctacacagatccaggctgcagttgaactggaccctcataggctatccagcttacacacagccagtgtctttggaaccagaatgtgggtctagcatcggacccacattctatctagtctgcctagggatttcaagctgtgaacacatggctatagggaacccacagccctcttgtgcctggtacagattctattttaccagggatacaggtagtgtgagggcaggaagtgaacctttctttgggccataaccaggctgcatcttaaccttgacctctcctggggctgagacccaggcagggcctgggctggcagttgagtggcagaaatgcagttggttctatattgtagatagtgtatgtctacttataaagtccttggccctgtgtgaggagctagcctcccaacacatatactaaaaatcgattgggcaaggagagagcaggcgtggtgagtgtgacatccacattttgcttcctcagatttttttttagcttccgtttccccttctctcagggcccttcccttaagcacgtgttctagaaggacttgggattgtgcgtctggacaggggacatgtccctcagcctcttctgcaggacagatgttggacctagattttatttattgtgagattcctctagaagtggaaaggatgtgtgaattcttggtgttcggttggaattgttttttatcggtggagaggacactgcttgcggccagggtccttcttatcagagttgggcatcattagatcttaagacctatagggaacctgtcaggaaacgtgcagggtgaggtgccccaggcctgggaaaagaaattccacaatggagtctttctgggtttactgcaaggtaatccctacctgggggccttccactccaggtcagatctgacttctgtgcaggctcccttctagtctgcttgcaggtcccccttcggattccatccacgtggtattatgctctgtagctgacttcatgttggtcacctgggaacttctcttgttagaggtgaccctgtctcctgatacactagcggagacagtcctgagttacctttgtcctgtctggaggttgagtggaggctgggcagtggatagtgttctgtgccctcagggctgctgttgacaggggtcacagttaggacataacgattcagagaggtgcacagttaggaagaggactgagcaggagacctgaggccctgctctgctaggctaggacgagaactaaaagcctcacctggccttttcagaaaagggtgtgtcacactggtgctggagatccacacgggggctggtgggccttctcgctgtcttgcctggagtccttgaaggtggcgctgaatgctgaatgtgtgagcacggaccctaagacctttgggagttcttcatggtggggttgagggtcatttacagggatagcagcacctgatgtgtgtggaatccaagtaagagggaaacatgcacagtttcccttttcaaaccaaagaaagtgctgggttatttattgctcagtggtagggtgcttgccttggggccatggctttgattaccagtgttcatattgtaggacaaagctgcacagaatagctggaggaaacaaaggatcccacagatcaggtgactgctggcaacccaggtggctgtgggctgcgccccacctcttctcaactgtatccgtgcaacaggcccttcccttaggaatcagaggtacaggtgtcagcaccagtcatcttgctaggcccatgctcttgtgggtgagcatgcatatatgcattgtgtgaacacgggagggttaggggagctgcttcctccccaatggaaggtcacatggtattaggcattgccatttcctatggccagactgcctagcaagtggcttggtatcactggcacggccttcaggactgatggggcatttgaatgttctctttacccagtcattgccttttttttttttttaaattaatctgagggtcgtcgcccagccttcctgaccactgtgctgggtggatgtcttaactgctgcaaagggttgaagagacagctcctgtgatgaaaggccctacctaatgccatgcgcttaaggccaagcagacttgggctgtctgggcactgggcatcgtagtcacattgatctagaaagatcacctggtaaggcggtgtctctcttgggcctggtgtatctgtgacctggcacaataggaacctaatatgatatatagggcaatatgtgatgaagagtgagttctgtggggctgagtgtcaaagggacataggtaggatgttgatctgttgcctgctggagcagtgggagagtgggcatgtgttccttgggacatgggagcaaagaagaatcccagtagggtgttcagggatggtacgggccactcaccagtggtggcagagacaaactgatggcttccagaaagtcagccttgtagtctttaggagatttgtgaagggcctaggctgaggattaacttagcttttgatggtggtgactcagggtagccatggggtactgaggtggccttggggaattccttaggaaagacggccttgagcctggcaggtggagtattatgtgcaagtgtgtgcatgccacagtggctgaggcaactctatcagagcagggctaccatggattctagtatgaagaggtttcccttaggaagcagctagcaacgagtagcattgtgtgagctgctgggctgtgtgttcttagcatgcattatacatatatatataaaatcttgtttgtttgtgtgggtgtggtactgtgaagttgcctgctgttcctagtacaccacaggtgttataggcatagcctaagagctgctttgggtgttggactctggctgaggagaagcagacgtaggcagcactgattggatttttgctgtgcaccccagaaaacatctcagacctaagcattcaccttcaaaaccatttgggagctgtctcactctgctgcctgcccggcaatgaattggggagagaaaggtcaaggagtaaagatgtatggccgccaccttagcagacaaggtctgacctgggagtgtcatggcaggcccatgctccagtgttgaggggcagagacattgggccaggcctgctgccttctggtgcttgagacaatggctccctcttgctagctgtacagttgggtacagcgtggggtcagacacccagcagtatagcggagagtgcagctggctagacagcctgtagttcctgttgctcttcagacattaagccctgcctttgcaagcctagagggcaaagtttggtgtacagtgttaagtattaaccactgttcccaagctcccggccctggccaagtggctgggtggagttttctgtcatttggagtgatagctacacaggaggcagccactggagtgtatgaatcctgctggactggacttcagagggaagactcctctatgtagaggcaaggaagccctgtgtagacagaagtggatgacactcaggagtagttagtcagtcttgactgtggtggcttgaggtgccaggtccaaatgggtgctgactttgagtccccactacggatcagtcataaagtttattaccttcctattatgcaaaggagagaaactgccctttagggtaggatctgggctgtgcagataagccttccatttctgttcaatggcaggcccatcttggtgatgagactttcagctgtctgttcatgtgtatgtccatggtagccaggccacaagcaagtataggtttggggcttctgagtgtgtaattgtgttgtccctggatctgagttgcttagtaagcatgtcagatgtcccctttggctgcaggcgtctatagaatcaagtctctcttaagtaagggcctgcgctgctggtgctggtgtcttagggtctaggatacctataggtgagaggcaagactggcgccaccagccagttgctggggtacctaggctgtttcctccttgggtaggcttgttttaagaaaaccattgggttaggtgtagaggtgggctggtgtattgggatatgagctggcagtgccacttcttgatctgatattctcagatccactcatgtgttttatcacagccccatgagggaaggatctgaggaattctagggaagaaaagggtagcagtccagatctgtgttttcatagttagacatgttttcacttccttgctagttcaatgcaggggcttgggtgtcatcatctctggccttctggtggcctgagctcctgtctttgatgtttgcttacgttagagtgacccatttctgaagatggcaaatgacttttgagcatttctcagtgcctcagtttttctcaccagggcctcatctcttacaaaggcagccgtgacctttcatctttaggcccatccttctgtgggtctctggcgccagcaggctgggcctggctttctcagaggctcaggaaacatctgatggccactggggaggactgagtgctctggaggccagaggagggagtgccagtggctcttgggtttcccttttcatttaatggagggacttgaccacagcccagacaagtatgtaactgaagctgcccctgggaggatctgattggtgtcctgtggggctgatgtagggggtgcacaggctctatcctcctgctttttttttttttgagacagggcttctctgtatagccctggctgtcttggaactcacgctgtagaccaggctggcctcgaactcagaaattcacctgcctctgcctcccaagtgctgggatcaaaggtgtgtgccaccatgcctggccttcctctgctttgttgtggacctctatcatctgggcgtttggggaacagcatgccctttctcagctccgatgatgctctgctctctggagaagagagacaggatcatggctagcaccagcgtgtgacatgggatgggagactgaggtcactgagactgtcttcctgaagggtatacctttttagattaaaagtcccagactgcttaggtagcttctacggctgtcatcccatagatgactaatgtcctgaggtttgccccccacaatggaacagtctggagctctaatttcttttggccttgtgcggggagtatgttgccatgtagatgaacagtgggcatgtttctatgtacacgtgtgcatggtatgcacacataggtgcagtgtacatataattatggtatatactaatgaatgggtgaaaacatgtatatgtgtgagtgtgcatgagtaaacatgtgtaagcatatgccatatgtatgcatgtagaataatgttgtgtgtactgtgtccgaaatcgtgtaattgtagtgtgtcagcttgtctgaattagctgcttctttgcatagaatctcttggatgtcaggtggtaaggctccactctgcttctctgggttttagctggtttgaacatagatttaaaagcctattggaggagatgcctacccagactgctttgtaagaggacataaggaataccagtgacctttatggtcacgtcttggggacagtcctactaatcctagggtaggaggtagaacaggcttgccacatcgtttgggaagccttgctttactactctctgggccccccagacctttttactactgttcctctgagaatctttgcctttcaagctatgtgagacatggtgctactgagttaggctagggagagcaggagagtggacaactagttgtgcatttaggtactaaccaaggtttgcagggtttcctgccctcctaggcattaactttgctcacacacctggcttgacagtttctgcttaaacccagacctgttcccatggagccttgtggagagaagtggggctgcctgccactctggtgcagatattctcctgcctgtgcattagagccccacctgcagcccagcagcagtgcagccttgaagcaaagtgtattgctttgcaggaagaaggtggggttgggcctgagtgcagaggaaacactctaagccactaacttcaaaagttcccacactgaatcagagtgacagagaggccaagtcgggcctgaaagtcttgagcaggacttggaacaggtgggaaaggactgggcctgttccctgaaggacagagtggctctcgactggacctctctgtcctggaaacctgagatgggaggcaggggttagaggaatgtgcatggaaaatgctataagaagtaagtggccctcttacttctgtgggtggttcttggttctcaatatttcctttgttttctcttcagaacgcgttgttcattcagccagcagtttgctgttgaaagtggaaagctgtcagcctggggtcttgtcagtcagcctgtggctctctctcattaaccatgctctatcgtctgtccccctggcctggattttccaggttgctggattttcaggatgcgtgaaagttctaagaatctggagggcagtcaagagccggtgggcattcttttgagttttcagggccctgaactctgaaactcattctagcacaaaaccatttcacaatgcagccaccagggtagttttatggtggtggtcttgtctcggtgcaggccgtcctcaggaagccaaagagcaccttaatgttaccaggtgggacttcattttgttgtgggtgcttagtagccaggcctatgagctaaacaggttgcctacctcctcccccaggcctctgtacacaaactcagctcctctgtgacccatgccccatctccagtgttgctaagctgggtagactttccgcctacacttgatggcaggaaagggaggaggctgctggcctttgcagccagctctattggccagcctcctcaacctatcagggaatatggctctgagtccccggggttgctttctatccctcccttgagccatcgagggattagtagtaatgtcctggagtggagccctgcctgcctcaggaagaacaagggtgggagaaggctatgcctgggtcatgctgttaaggcctggctgcctgtgaatgggtctgggggcctgccaggttgtgcctggtttctccctactaagacaccactctgcagggagcaggctgggagtggggaatcaacttgctgccctggagcagatcctgggctgagggccagcggtggttctggcactgcttggctatgcctatgaagcttggctggatttcacaaatacctgatgcttatctagtggagaggttgtctcctcccatgcccaggaccctggccacctctgacctatgtgcacacctctcttacatagtcagaatctctgaagggactgggttcctaaagcttgaagcctttagttcctccttcagtgggactggagagactgcagctacaggaggaaactgcattttgtaacatgcttgctgaaaaggaataccgcatttgcatgctttagaggaatccattaagacatatttgaggggattggagagatggctcagcaggtaagaacactgactgttctttcagaggtcctgagttcaattcccaataaccacatatgtgaggggtctctaagtagaaggtgggtaggtgctggttggtctttgttaaaagtcagcaaatttgcatttccacaggtgagttgcatccaaacacaaccttgtttgtcacatgcaggtcacaaccaaccacagcattgtgactttctgggacattatgcttactattatctgtggttatccatacactttaaaatgcatcaggcttcagttggacatctatgaagcagggagagcctatatctagtgggcatctgtgaacaactgtccccaggctaacctagggctgtccccatgtaagatgacaaagtgaaaagccaaggtgtttctccaggttgaaacgcatcctgtagccttcatgacagaggtcagggttggcccaggtcccttgcagcttataacatgccttcccaagcatctgatgcacttgtaaggaaactccatggatctctgtgggcccagggccctggtgagttttcataggaggccttgcagtgggcttttcccctgtgaagaactgcagcctatgaggaaacacgggcttgtgggcagtgtttacagaactgccagcccttgtatggtggtaacagtggctaatcccctttacgtcatagacaggatgcccagacaacaccctgaccatctaggtcggtaacagggtgttacagcagatgggtcttaagtgggggttccaagggtggtaggttgttggggtggctgatcaggatctgggcctccctggtgccaggtaggaatgatacagtccgcctgaccttatggcagtattgtggagctgtgctgcggctagtccgcactaaagagttatgatgcttactctctctgcgactactgccatattccccggagggtctctgtccactgatgcctaggttctgaggggtttccttgtttgccctgcatgttctacttacatgtatgtctatgtaccatgagtgtcttgtgccaaaaagaagccacctagaactggtgttgcagttggttgtgactcaccttgtgggttttgggaattgaatactggtcctttgaaagagcagtcttagtgtctttgtcctgtcccaggagtcctcaggatatctagttgtccttgtaagagtttcttacacttactcatttctggtaacctgacatcatgggagtaaggttaggtcctggagagttctgtggggatcatttcacttcccgcctgggtctgggtctgggtctgggaggaagggtttaggggatgagtgcctgccctttatttagtataacattgggtctttcactgtcccaggattcagccctgttaacctgatcactggggacagttgtctgaggcccctctactcaatctcctctctaggtctctcccttatcgagttggctgctctatctccttcactgaattgtccacagtcagaccctttagcctttgggtctgacatttagccctttaatttctctttcgacaaatgacacaaggcgtggtcagctgatataccaccctctctggtttctgttcaggctggctgcccttggaacaatcctttgctgctgaggtatcagctggcagctagtaggtataacacagggagtaggccctggctgccaaatggggcagtgaaggattacggagtcactggctgctagagatgcctgagacctttatatatgcatctcaaaggcagatgtcagaagatagctgcatgtggcacaagataggcatggtaccttcagttgtatctttctaggagtctgtatggcttcccttggatttgaggttctttgatgtttctgtagttgattgttttatagttttatacatgatgttaccaatgcaggcaccagctctgctggaaggtttgctagaagtgcttgccttcatgaggaatctccatggtttgtggccccctctaatctaaaggagaattccctcagtactttagctcctctcttctgtatcccaagacctgtgggtctgtgggctcagaggctctggggtttgtagcagatacatgacagctcagccaagcagtctttgtctttctgttgtttccatgagtgaggcttgcagggaggagagggtacattcataagtcatttgttctattctagattttatggctgaagatccttacctgtcatttgttattgttgttttatttttgtgtttctgagacagggtttctctatatagttctagctgtcctgggactcaacacgtagaccaggccggcttcaatctcacaaaaatcaacctgctcctgagtgctgtgatggattaaaggcgtgggtcccagccatcagactctgccacatttcttaatgacaaaatcagccaggaaagatacactgtgaagcagaaaagatacactgtgaggcaggaaagataaacactgtgaggcaggaaagatacactgtgaggcaggaaagataaacactgtgaggcagggaagatactttgtgaggcagggaagatacactgtgaggcagggaagatacactgtgaggcagggaagatacactgtgaggcagggaagatacactgcgaggcagggaagatacactgtgaggcagggaagatacactgcgaggcagggaagatacactgcgaggcagggaagatatactgtgaggcagggaagatacactgtgaggcaggaaagatacactgtgaggcaggaaagatacactgtgaggcaggagagtggggagagctgaatgacttagtcacatctctagtccatcaccaactcttacagaacccaggtgtctccaagtagtgttctctgtttccccatcctgcatttatagggagcacttggctttgcatatttctaaatcttgctacatctcagctatggagggttctgggctctgcctgccccgtgacttctgagtgaaccctttctggttgttctgtcaccgagtaaatggcaggccattgctttttttttgtttgtttgttttttttttttttgtttttcgagacagggtttctctgtatagccctggctgtcctggaactcactttgtagaccaggctggcctcgaactcagaaatccgcctgcctctgcctcccgagtgctgggattaaaggcgtgcgccaccacgcccggctcttatggcaggccattgctaaccgagtgtgaaatagacaggtttttagaagtacttctgtaatgagaaaaatggatcgcttctggtccacaagtgtggaggcttatcagaaaagtttgtcttccttcctagggtggagaggttgccttgtggtctcgtgacctggccacctgatcttacccacaggtggagagagtcagtctgcctggcacctacctgcagagcactggtgcctagatttcctcccagctggtggagaggccatgtttaagtgcttggctggcagtgggtacttgaccttgtacccactcctcctcatgctatccatccctctgcctgcttggcagctgtgtactcagctgatctctgcccaagatgcttctagttgttgtgaatgtgtagtctgacacagagagacgccacctctggtgagcagctttgccttggagcttaacggctttcagctgcagtgactcctgagctctggctgtgagggtttggttgttgtgtgtgcttaaatcaaagttccctttgtgcagactgtaagtgtcaaatatcctctcaaaaatatgattcagaccttatttagatactgaagtaattagcagagatgtgaaaatcaacagtcatctagatgacaaaatggatcctggtgtgttcttttcatgaaagcatttctttctttctttctgtctgtctgtctgtctgtctgtctgtctatctatccatctataaactattaatctatctattctctaccttatatcacctatctatctatctatctctatcatccatctctctctaatgtgtatgagtatactgtcgatctcttcagacacaccagaagagggcatcagatcccattacagatggttgtgagccaccatgtggtttctgggaattgaactcaggacctctggaaaagcaatcagtgctcttaagtgctgagccatctctccagctcctgttttattcttaattatctctgtgactctgatggcattagaaaggaaggacctttagatgctttcgctttctcaatgccccgaggatgagtaccataaatacttcccatgtgtttggtttaggtgtgatcccatctgtgatgtaatttctttggatctgcccagccagagcttggactttgatgatgggtgtatctgttaaagaattagtgtaactgggctggggggggactagagagagtggttgattgtagacttacactgtctttagcacagcccccaactggaggaatgtactgaaattctgacgatttgttttactgtctttaaggtttgcatttgtgtgtgtgcaaatgtatgagtgtgtgtatatgtgtgtgtgcatgcagtgtatgtatgtgagtgcatgcatgtgtgtgtgcacgtgcatgtctgtatttctgtgttgtgcactcatacattactttgataagcgatgaaataaatgaaaagtcagatttgtacaagttgccacagtggatgacttactgtgagccaggttgaggctgtgtgtcatgtctaccccagtctccccagcatctgtttgtatccttacatttctttttaggtctggcagcccttgggcatcctgtacagtcgtcccactgaagagttgtttaaatgtcatctggtagacagcttcacaagtgtcttgccacctctccctgggagtgttggtcgggctatggagtgctgtttccttagatgagtggtcatcactatacctgtgcatctgggcaaagggtgaggaaaagtttgttgaccacactagctgtgactgctcagaacagcattgtggctgccctttgtgaaagacccaggcaggtgactcctaaactcaggctatgggtggaggctggaggtacggtttctgaagagcttttgcccttctgtgtctttccatgtagtcctcctccctggagactagtaacttgagctgagctggaggtgagcagcagagactttgttcaaggtcatgagcttgagttggctccatttgagcatctgagggagaatctgaaaccctgtctcctgaccctctggagggttgttgggctatgagtcacaccctggtcctctgtgtcctcagagctggtgacaccagagtgtgttgcatttgcatatgtttctttgtttgttgttgttgttttcaaaacagattctcactgtgcagctatggctggcctaaaacttgccatgtagaccaggctggctggcaactctcagaacttttatctgcctctacctcataattgctgggattaaaggtttgtgctatcacacctgacttctttaaacctgatattaacttatttcctgacatcagaaaatcataagaatacaaagaagtctctcctatgcttggcttcagctctctctgcttgggacattttttcccatgatgaaatattctttctctttcccttctcctgcatctgtctcttctcacacacatgtaaaggctgtgaggctcttttgggacctaccctctccaaaaaccacattttctttcagactctctatagcatttactaggtgagaggactactgttcacacagcaaagatcttatttgagtttcaccaggtcatatagcgtgtgacgtcaccataaaaagcctgctatcttggcttcattctggaattttcctgtgtgcctctgccttctgggaaggaggaactgcaggcttgtgcctgtgggccctacagcctggatagtggcatgatgggagcaccccactgagacgtagggtcaagaatgtttgctggccagctacctttttctatgatatgatagctgtgacccctcagtaattcagctgggcctaccccactaggctgtgtatcccccattgtctctcggctacaattcccaaggcagtttcttctagcctgtccactggtctgtacaccaaagtattgtagcaggtctccatggcttgggtgggcctcaggtgcctgtgtgtgtctgtgctccagtcagttgatgcttagatggatggtctcagaagtggtcatgggggactctccagatggtgccacttggcttttgacgtcactgacatttcctggttacatttagtcttagcatccatccccctgccttagctctgtagtcagtggttctcctgagataacctaagtagaaaatgagcttagcaagtcagttgtaggtgctgagaatacatttagttactagtgtgcccttcttcttcttcttttttttgtttttgtttttgttttttcgagacagggtttctctgtgtagccctgtagtcctggaactcactttgtagatcaagctggcctcaaactcagaaatccgcctgcctctgcctcccaaatgccaccaccacccgtctgtgtgccctgctttttgacctgttagctgacagaggtaggaagctacacacgcgtatgtatgtgggtaacatgtacacacaccctgaaaagcccagagtttcccatcattcttcaggtgtgtcagggctcatctggccatccctttcctggaggggtagaaattggcctccactgtccacagtatagttgggtgtttgttaaatttgtatcttttactagaagacctgggatgctgttctagaatgttttacccatactctggagaaggaactgaacaatgaggattctgtgtttggttatagtgttctgggtggttagcataatatttatataggttaaaggttatgaaaggaaaagtattggcccaggattcccaagaccccttctcagcatgaaggagatttatctgccccacagggacaaatggtagggagtaagaaacaaaggtaggagataaaggatgatgggagaggagcaagggagaggggagggtagagggttatttgtccttgaggacaaaggactgtcttgtaatagagaggagacagacatggccaattggtgacttctaaacgtaaaataggaagtcttgtgttaggatgaggtgtttaattttaattgggcatggtgaaccaaagggggcttttaatcaccgaacttcagtactttggtacctggacttttggtagtcaggctcaggaggaaggattgggaatagaccttgggggctagctctaggaatgtaatctcatgatttttagcaaggcagaaggactcagggagaagggcaaggccctccagagccatgctagagctggccagcgtcccttcagctcacacttctttccttggaaggtttgaaccgcactgttcggctctctcttggccagggctcttatatctgttaagtttctgtcttgctgtggtccacctctcctgtttctttccgtgtgacttcatctgtcctttgactgtcttatatctgccacatgtaagtaagatttgaagttggtgagatgaggagatctcacattagggacagttgatagtacagggtcttgcctccagatggaaggaagttctacaggatgctggcctggtgtctctgtgtaggggcaggtatgggtttgatgggtacccagggaggttgtgccttggcctgtaagccttcacttgtatgaaaggctctgcctgatttcccaagggtgagcatatatgcataggcagatcagcagacatactctgtttccagcttcctcaccatccagtaaaggaccagccagccatattttcagcatcagtccatggtgtggcttacaatcttgtcccctcctacttgctccaaggtcctgatgtatgagctctgggtgggattgagccttgctgtgtatattccactgtccttagagttcctgtcttatcaaaggcacaccgctgggaagcatagtgtggctatgttttcagcagtctgtgctgctccatgaattctctgcagaagactaccatcagttctgttcctaccttactgtagttccttggtgatctggggaaagctaagagccttgaattaggaggactgggacatgggtggagagggtatggggggagggggtggtttacagcatctgagtgcatactggtgagggaatttcttattagaccaaagccacttctgggctgtgggccctaacaaaggtttctccctctgctttggtttagcgtaagtaatcggatgccacattttaggggcctacttaaattcagggcagggcactttgtgttcttttgttccctgacccttgatgaccttgattattggagtttgttactaggacctgggtcgggtgtatcctgagacagaaaggatctagtgagcttcaggaacctgcgtcagcagctcctgtttgggtaccaatccaggattgatggtaaaccaccgtctgaactagctagtagggtaggaggtgtgtgtgggccttccccggaaggccagcataatcccaatgggatttaaggaatttgaaattcaaagctactgtcaaaacaaaacaaaacaaaacaaaaccaaccctggtgtgtgtgcctcctccctcaaagagggctttagtctttaatggggccaatctgtttgtgaggtacttggcttttaggatagtcatgtcagatgtatcacatgtctggttagtaggacttgaaaggggaataatgtaacttgctgtcacccaactggaggctgtttagaatctttacctggtttctccttccaagtagctaccttgaaaaagtccaagaatcattgccctgctcctaccctatgttccgacccatgatatgctcagcgatcaagaccgtggttccagacaccagcacaggggactcaagctgtcacatcaggactctgttcttggtcctcctgaagccctttgtttctgtcatctgaggttgtgagccttggtcttacttccagaaggtgacctgggctcggggagaggtctcgtatcagaagtctccttcgggttctttccttcttcaaggatgctccctttttgcagacctctgacggcagtacctcaggagccctacttaagcctcaacggatgtcaaactgtaaccttatatttttttgtgactgaacaaatgtctgcatcctggggcagctggaacatgaggtatcaagaccatgtgccccatgccttggtactccatgctcaggaatccaaacccccaaggtgtggtctcctgttatccagggcatcataaggttgcaatggttactggacctgcctgtcaagggccttgagtgtccaaaactccctgttgactgtggacatggagaggaagcagaggtgaggatcctacttgtagggtactagtgtagaacacactgaggatctaacctgtctccccttgctccatttgccaagactgttcttgatttttttttgaggtggggtggggtgggtgttcctttttactgccccttgttcctgagaggagtagggtcactccccctgcctcgggcctgcctttctctgcacacatagccctgtgtacccacccactcatgcctcaccagaggaggtcatatagctgtttcggagttaagcttcctttccccttataaggccgtgtccagcagcacctgaagtttctccccatgcaaatgagacatccccaggacctcagtcccaaccaaccctcaattgcctgcactcaccccctaaaaggtttaaatagcctttgttctccccgccaataaactgagccagttctccgaagctgttcctgggtgtgtgtgtattcttacttgagtactcaccagtccagtgtggtgtgcagtgagcctggctaccccgaggggagaagaagacatagaacagtaccatctcatatgtggaaactgaggcagagaggactgttctgggaacctggctgtatgagacctgtcctgggtaccaagggatacggagtccctcagaggcacatctctgccaagaccctgccggggaaggaattagaatacagggtcccggacctactgatttggccactccctggctcagagcctgcatggcctacgatcctgagactaacctgactgactatcttccacaggagatggaaaccccagggaaaacagccctttcatcaataatgtggaggtggaaagagagagctacttcgaggggaagaacatggcactttttgaggtaattttgtttcagtttctacacgaagaaggtacattagtgaagaacttgtgggaagaaggtaaaggagtggccatctcccgtgccccaggcaagggcagcctgggctgatgaggaaggagcaaggtgcttctcagcctgagatccactgagtttatctgtttctgataagtgagctgcaacctgggctggtgcattccttacagttcctaaaagccttgaggactctcagtgcccctgacttctgattccagacctgttggatagatgttctgggcacacagatgggggttgggggggtccattcacttgactgtgggctcttgagctctacacagccctgggacagatggatctcctgggccagggaccgctgccttgggatgttgacggacctggttcctacctatgtgatgctttgcacccacaggaagagatggacagcaaccccatggtgtcatcactgctgaacaagctggccaactataccaacctgagccagggtgtggtagagcatgaggaagatgaggacagccggaggcgagaggtcaaggtacacgcgctcccctcaggcagatagcagtcttggaggtttctagacagagaacacccttgccaggttttcagatcacgtgtgcctttcccttcatgaggcttgaccattttcatctatacggtaccgtgtctcagtggacaccaccagcttctgggaagggacaaggtcctagaagtcatgtgcaggctgccctggatactcttgagtgggcatccttgggatccatatagctccaaggagaaggagtggcactaaaccctgcctgaggcctgactttgtgtttcattttattatttggttgcagtgtttatttatttgtttttgagatagtctcaatctggccagaagcccactatgtcacccaaagttggctttgaactcacagtagttctcctgcttctgctttcagttactaggatggcaggtgtgtgtgtgccatcatgtctggcttaaagccttccctaaagcttttgagttttattcccctcagttctagctccctgaggtctctgctttctctggagggaagagttcaatgctggtgagcaaagatgaaggtgatttgtcacatctgtttgtcacatctatctgcttccaaggtgcttctcatgagccagtacccagcctgactgtggctctatgaaagtcaggccacagagtggcattggctgtcttctttcctcctgctgtaaagacagcagggtcaagtctacacagtgttcagcacttcccagacgattcagatctggggccatgtggtctctggggacagggctaaggttaacagaggcatgggctgtcttcttggcagtagagcagtggctcttagaaacactgtctcggccatgccttttcctgccctctcccagatactctgggcatccttagctgaccctgttgagatggcagagtcacagctgcccagatctgctgaatgatgggctgctataaaggagaatttaggggctgtaggtttgtcactcaaatgtgttggtggggtatgcttgtgctcccagcgctgccccatggcccaacaggttcttgggcctcagaagccccaggccttccctgtccccagcacacatgtccatttgtccatctgtctatctcttttgtctgctggaatatgtgtccaaggaaaacttggcttgtgccagggaacagacactagactgaatgcatcttggaactgaccctcagctgcaactctgcttagtcaaggccctgctcaggatgatcccgtagtttagtccttatttccttagagtggagcccagcagacttcgctgcctacaagggcagtgtggaaggaacccgtccttgtaagcagggcatccaggtttggggatattatacttagtacagccatagtatattttaccctaacacaaagtatgtcaattctctggctagtgtttccctgggtaacatgtttctggactggattttagttgattaacagctcacagcagagctgcttattgtggttgaaaatgtcctacttagggatccattgggttggcaggacagaagtagagcccgcctctggtgtctcctctgatggcacagaagcttgtccccagagacaggaatcactttcttttgagctgcttctgggttgtaaacaggtctggatcatctggacaaagctaagagttcagaggtggccatcccccttttgaaggcactgggaaccccaggcagtaggatattgggcagacagctcctgagcccgtgtctcagtgggatctgaagctaagctatgtggcctggcagcttcttgtgtatctcaggctaccacccatcaatggcctgcctagacaagttttttgtctgccatgtttctattagagctattggctgcctctaacgtccatctcacactgtgttcttgtacaccgaaaaattaacaagacaggttggagagatggctcaacaagtgagagtgattgctactcttccagaagatccatgctggacagctcacaaccacctaggactgcatttcaaagggagccaatgccctcctttgtcctctattggtatttacattcatgtgcactataccaacacatgtatatgtacatataacataataaagatgaaaataattctcactcatgtgcatataccaacacacatgtatgtatacacaacagaataaagataaaaataattctcaaaaagtcccaaaggcttttcttcatctgccagcttgtagaatccaaacccataaagactttatcttctgaccccagaatgcagtgtgcaggcctcgaagatagggagggcatgaggttaaggcttaggtctccctcttgatatatgtgtgtgtgtgtatatacacatacatacacacacatatatatacatacacacacatatacatatatatatatatagagagggatatatatgtttactgtgatgctcactggccttgggctcagggctaaggtctccaggctttcaaacccagagcttcctcccaccccctcttttcttttcctgtgaaatctttgatgtcgggttggtggaagttaagctgccctgccctggatggctcacagtggcaggggtcctatacaggcctgagctgccatcctgtcttctcaggtttaggtggtcagtttgttgttcttgcactctgccctctggccggctgcaaccatccagtaccgatccttagctgctgggctctccctgtgtggtctcaggttggatgacatcctcagccaggcttctgtgtgagcatcgctctgtaccagccttgtggtcatcatccacaggggatgtgctcatgctggtcctccatgctcattctgtgttctcctaaactgagatgagcctccttcgttggggtctgctggctcctcagctcttgtttccctaggtctctagtctgtttcctgtcatattacaatgagacttttaaactttataggtagccttactggtatctagcccttctctggcctcctttctttcatgtctcaagcttcctggcaccaaggtccgggcccttagctgtctcacatatataacaagggctccatcttactgtcccagaattcccactctgattcttctccccggtaggaaagcagagccaggtggatttcccccatgtctgcctagtatggttttctttccctccagcacaatgccctagatgcccggggttctgctctagaaccacagaacctcgtcttatttggaacataaatgtttgtcagtcatctttgctatccttgtagcttcattgtagatggccaccatgttcctcccagttcctatttcccctgacctccaaaccaaagcatggggtagggttccagactgagttactgggtacaggctttgagcctccctggacatatgatactctgttctaggccccacgcatgggcaccttcatcggagtctacctgccgtgcctgcagaacatcttgggtgttatccttttcctgcgtctgacctggattgtgggggcagctggtgttatggagtccttcctcattgtggccatgtgctgcacctgtgtgagtgtttacagctagtcctggggcaatttctcaggaactgatgctggggcccagagagactactgttgggaaatccaggtctgcttttaggtccctctctagggaccagctcctatcaaagacttgggaaagacgggccggcccatgcagcctggcaaaggccaggtttcctactagtctgaagaccttacctagctgtatctatgttgagggtggcatttctgcatctggggacttgaggaggctgagtcaggggcaggtaccttttactgggctatgatgagactccacctagtttggaaggatcatgattattttcagggtttctcttatagagaaagggatacagatctgtaacttgttcaagtccaggcctccagcatgtcttcttatttctagtgacattttgttatgctggtttatcttatactcacagcccatttgtttaccagccaactttcaaccataatatggtagaatgagagtctccttgactcctactgcaggctacctgaccacttgttccctgataagctcacacctgtgtgtctatcccaggctacccactgtcctttgactggtcattccttctggctacctgctcgcctgtcccatgagtggtcagtctatgttgtcattccaagcctctaacccatgcttcccgactggtcacttcatgtgtctgccccaccatgaccaccctggggcattcgcctctatttccagactggctattccatacggtcaccccaggctgtcttctgtttactttgtgtgggcacttgaggctacctacttcatttatcacccaaatgtcattctttgtggtattagcattcctggcacccacaaataaacttttcctgagcagagggtgcttgctggaggcaaggtggatacaaggtgaggtgccgtattccctgttggatgcacatctcgatgaagcgtccctcttgtgcatcgtgggttggtagaggcgtaattgggtcaggcacctagatgaggttcagcttacagggctatggcaagcagggtctgaagcccctgttttctgtgaccttcgggaatggatttgtgggttgggtagaaaagggttgacaggcaggaggcctgtctttcctggtcatttagtacctcctttgaggtcaaaagcctacaacctcaggctgggcatgttggagcatcttagggcacacgtttcctgaaagagctgcctctctttgcagacaatgctgacagccatctccatgagcgccatcgctaccaacggcgtggtcccaggtgagggtgccagcacctgtggcccttgaattagtttattgatcttgttcaggacaagagctgcgtgcgtatgggtgccattcctgccccaagctcatgcggtgacggtaacattttaacttgttttcaccggggtggcactggagtactgtgctgcccatggagtgaagagaggctctcttccccagagactctggtgtggacacaccctcactgcttgcctgtctgttattatgatgacgggaaccacatccttgagttggacacaaacctgagtagaatgcaggtccttctgaagtgatgagctagcagagatacactgccaagcactactgcctgtcctctgcataaaagagttggcaggcctgtgccagtgtctctcctttaaccatctgagggcatagcaggctttctgaagacagatgaggtactgtacctgcctgtatcaggcagttctcatcacgcttgagctagcctgtaccagtaggcaggctagacctgaattcatagcccaaggctttctggtggttctgttttgagggcatgctaaagctgcttgtcccttagtggggacagatctttctttgtgagtgctcagtgttcatagtgaatggcattccctgacccatattttatcttgggttatctttacagcgggaggctcgtactacatgatctcccgttcgctggggcctgagtttggaggtgctgttggcctctgcttctacttgggcacgacatttgcaggcgccatgtacatcctgggtaccatcgagatcttcctggtgagtccatctgtggaagtcttccttacccaggcactttgcccatgggctgattcgtatgttacctctgactgtcctctatcctgctgctctgcatgtcttggctctcaaagctcctgtctaggctgagggtctgggtccctgatgggtgagacctcatagtctgtgctatctcaggaggcatgtgtaactccttgagcaggattctagccttcaaaggcaaagcagttctgctcatcactgtttttttgtttttttaatttatgtatttattttattagatattttctttatttacatttcaaatgttatcccctttcttggttcccctccccccaacccccctatcccatcccccttcccctgacatcactggttcttatagtatgcaactcctattttattttattttattttattttattttattttattttattttttggctttttgagccagggtttctccgtgtatccctggctgtcctggaactcactctgtagaccaggctgcacaactcctactgtagaagggcttccctgcaacttgatgttgggcttgggctcaatgtttggtgggctctgtagcataagtttctgtttatcatgggtactgtttgtcataaccaggaaatcatggggacaggagcttgaagcagtatgtagtgtcagctgtcaggaagaagacagatgagtcatggtgctaggctttttcccccctctttatacagttcaaaaatcccaacccagggaaatggtgccacctaccctaaaagtggtgggtctttccatctttttttttttttttttttaaataatttctttattattgtacactgtagctgtcttcagacgcaccagaagagggcgtcagatctcattccaggtggttgtgagccaccatgtggttgctgggatttgaactcaggacctttggtagagcaatcagtgctcttacccactgagccatctcgccagcctgggcctttccttctttaatgaactcaaaataatccctcactcctgtgagctaatcccagaggaatctaatatgacacagatcttcccagaggttttctcctgagtgaatctagatcctgtcaattgataataaatattaaccatcactataaccatctcgatggagctggctttttttctctgctacccaagcatcccagagccagcagagaagccttcccatgctttctaagaaaggtttcacggggacaaatgcatattctaatttggggagtctaggctgggacctaggattccttgtcccactatgggtcccagacctgcagactctagattgtcatgctcatttctagggtctgttcggtctctgaggaagtcccattcctacagtagagcagcttggaggacacactagctacttggtagctctctggagattgcgctcagcagtcagctggtattagtaaagacggaggaaatgtgctggactctgctaaggctttggcaggagtccttggcccctcaccacaagggttctccctgcctgttagtaacctgaccaaggttacaatctggctttggcagctggagggaactggacaggaatgactgcaggccggatgccctgggtccatcttggatggcacacaagattctgtctcaatgtacccagtggcctcaagcctgacaggcctcctttgccagtatcaggaagggaggcagtgtgaggtcaaggctgggtgagttcctggacaggaccttctttgctgacctgacttattcttacagacctacatctctccaagtgcggccatcttccaggcagagacggcggatggcgaggcggccgcactgttgaacaacatgcgtgtgtatggcagctgtgccctggcactcatggcggtggtggtctttgttggtgtcaaatatgtcaacaagctggcactggtcttcttagcctgtgttgtgctttctatcctggccatctatgctggtgtcatcaagacagcctttgccccacctgacatcccgtgagtcccaggccatcctggtggtggtgtgggtgtgtgggtgtggcttggatctaatgctgggtcaccttgctgtgttgttccaggggctgggcctggcctcctggttctctcttctcctagcttctctggggaagaacatggaggtatccttgataatcattcttgggttccagtgtggttttaaggaactttggagtatggggtgggcacagtgcccatgcagtggattctgtgtgcatctgtgatgtcaggaggctggtgaaggttgtccttatttcagtgtggactgttggattaattacttttttgttgctgtgataaagcaccgtgattagaaacaggctatggaggaaaacgtttattttggcccgtggttctagaggggtgagagtctatcatggcagggagaaatagcagcagaaagcaggcatgttagcaggagtaggaagctgggggttgggggtggggtggggtgagaggggaagcgagtctggcaaagtccgtccccagaacataacttcctgaaacaaggccatatgtcctgaacctccccccaaagcaccatcagcaaggtatcaagtgttaaatgtctgagcctacggaaaactcaaaccaccacagtcagatggccaagcttgttagaccattcttatctcatgagacatggcttcctcatctttatagaaacccttcaaatgagctgcctcttgtccttctgtgggattgaggaggttaaccaaggtggccggtgtcgcagcaagttgagtgagcatggaccaaggtgcagtctggacatgttgggactgccaaagcccttggtagggaatgtgggagccaggaagggacgaaaccacagagctgtatgtagtttcaccatttttgtggagggtttggccaccttccagagtaagttgccctgggcaggaggaagacagccctcacccatggagggcttgtatgtgagatcagtcttcaagctgctggactgtgaccccatgcttgctcctgacatgtggcccctgcagtaacacgggttacgtttattagagttgctcaggaggtgttgagccccgcagtgagacagcttagcagcgtggtgaaaacgagctctgccctttctctgctctagggtctgccttctagggaaccgcacgctggcaaatcgcaactttgatacctgtgccaagatgcaggttgtcagcaacggtacagtgaccactgcactctggcgcctcttctgcaatggctccagcttgggtgccacctgtgatgagtactttgcacagaacaacgttactgagatacagggcatccctggtgtggccagtggtgtcttcctgggtgagtgttggtggagacggctagggccacctctctgggttgtttggggctactcttagggtcctggttcttcttgcttagccgtattcctagggtcccgtccagccaaaccctaggctagaatggccttcttcatctgctgcaaatcagctgcgtaaggccatgcattcagtgtttgagacaaacactcactttgcagcccagcatggcctggaaatggctaggtagccttgattggtccagaacttatccatgtcattaccttctacatactgggataacaagtagtggggggcaacttcatcttagagagaaggacccagtcctggggagcctgaacacttggtcctcatagtctactctgtgtgaggttgggattctgtatgccccccagtggtatcggtgtgatgtcagtgggcagccgagggctgtgtctgggtgatgggggaggagcagatggttcccatactcaggacctgctggagtctcagaggcaaggtatctggagaaagcagcccccaaagggtctcaagaaaggcagcaagggcatatggattgctggctggaggccacctatgaagaggtccctatgggggggtgggtgtcactgtcagggtaagactgcactatgccaggctagaatgcagtagagagtgaaggtggccatactccctggattattggaggaaccaatatggttacaggctctgtttctgcctcgtgcgtggatgcctagcagggaggaggccaccaagactgtgggcagctagctgttgaggagcacatgttgagttttggggagagtggcttcatgcatgtggtcctcacaaggttgagtgcccctgattggaatcagagccatggaagaacgacctgcggttgtgagtggtgatgctgggtgtggacagtccaatgggcagtcctggccgaaggctgagaaatcctgactgttcgtattacagataacctgtggagcacatattcagacaagggggcatttgtggaaaagaaaggtgtgtcctcagtgcctgtgtccgaggagagccggcctggtggattgccatacgtcctcacagacatcatgacctacttcaccatgctagttggcatctacttcccgtctgtaactggtgaggcccccagccttccctcctcttctgtctttgtgtctacttctctgtgtgttcctaccataactcactcactctctctctctctctctctctctctctctctctctctctctgactctttcttgtctttctatctctttgttactgtttctgtctcttggtctgtctctattttctggtctctgtgtgtttgtctatgtttcttctgtctttcagtcatcagagatcacctttccagcaagcagtggtcgtattggcctatcttctctgatgaatctttctataggcagcatcctctaggttttctgtcactgtcatccgtatctactctgcagggatcatggcaggatccaaccgctccggggacctcaaagacgcccagaagtctattccaacagggaccattctggccatcgtgactacatctttcatttgtatcctttccttaaaggggccctgtgccgaggtgttgaactctaacgctgctgcctttgcaccagtcccctcagtcacatcctcattgtgcccatctgtggtgcgctgtccagattcaggtcctgaccacagcctgccctccttgtacagccttaggtgatgtgccacattaaaacatggcacctgtattcctgtctcttatgattgtatttgacacagtgtcccttaaaaaatccaagagaggagcaggggttgtagttcagtggtaagagtgcttatctagcatgcacaaggccttggcttccaatctccagtaataccaaaggaaaaagaaatacaacacatcactggattggtgcacaccaagggtgcacagccttggttgggtgtggtgtgagatatggcatgtcttagttagggttttactgctgtgaacagacaccatgaccaaggcaagtcttataaaggatgacatttaattagctggcttacaggttcagaggttcagtccatcatcaaggtgggagcagggaagcatccaggcaggcatgattcaggcagaactaagagttctacatcttcatctgaaggctgctagtggaagactgatttccaggcagctaggagtagagtcttaaagcccatgtccacagtgacacatctactccaacaaggccacacctcctagtattgccacttcctgggccgagcacacacaaaccatcacatggctttagcacagaccacagttgcttttgtgaaactgatgttccaggagtcctgtcctcccagcagggaggttggtcaccaaccatacaccttttgagtaccctgtagctagcactctatagctggacagatctgaggacagtacccagaggactgtggaggtgttgggcacatctgtggggacaggatatggagatgtcttaccacatggtgaccctggctacagtgttgctccaggcccgtggaatgggacccactctccagcatgcatttacctggagcttgcatgctactctattgccccaggactgtctgttccttgatttcaactcagatctttcctgcatagtgctgtttggggcctgcattgaaggtgtagtcctgcgagataagtatgttggggttctactacatgaaatgactatagttggtattgtctttcctgagggagacttcggctttgaaattaaatgacctctgggcctcacagttgtatgtgagttaaatgctcttatcagagggtcacactatcttttgcctgactaaagcattgatgtgtcgccccttgggcctggagcctgaagactgctcagagcaaagttgaggcctgatgaagctgggaatggggaatgaatacaggtgtgagaatgggagagataggatctagggaccccagtccttctgctcagttagcagaatcttagtttggaccattgtggactcttcattcttagggtactgcttgtcagaatctcagggcttcaagggttcttatataccgcatggtgaagaagtatagtaccaccaggcctacagggatatgaccgctgcagaaatggcagtggccagcaccaccttggtatcagccaggacttcctgttcctgatgggattctaggggaacagtttcaagccacctaagccctttctgagggggctgtcaggctgactgggtcctagttgggttgggcctctgaaatgggctcttagtttgggggttcacactcaaatggggacagagttttttttttttttccctgccttcagatcactctttagaagctctactgaccaccttcccttactcacctgtaggtttggggaggccttgcaagggaacctggtcattggcatgctggcctggccatctccctgggtcattgtgattggctccttcttctccacctgtggtgctggcctgcagagcctgactggggcaccccgcctactgcaggccattgcgcgtgacggaatcatccccttcctacaggtgagtccttcactcaaggtgcagcagatgaagctggctgccctgggaagagatcatgcaatgtcaggtctgggtgtttaggggcccctaagagtctgtcctgcagagctggaccgatagaatgaagacagggggcctatgtcctgcttttggatactatactggttatctcactttaactgctggactgagggtgcaggcccagggcagaggttgcctggttgttactataaagtccttttccagtgggccatgtttatccattgacctattgaggccatgtgaaggatggccccactggtgtcaaccatggatttggtgtccctggacctggcctctaaggtacaggatgcaatgagagtcctggaatgatatcttcaaaatgtcatagcccaatggcttaaaccaaaggaagttgttttccaaaaattccgcagactggagactgcccacacaaaagtgatttgaagatagaaaaaaagaagaaaaaaaaggaggtttgggtgtggcaggactgtgccctgagtctatctatctgtgtggcttttgggttttcttttgcatacagcatggtgacatgtgactaaagctaggttttgcttgtaagttttgtaagttattccatggttaagatgttccgatgacactgccttgcagatggttcattctcacaggcagtttccaaccccagcccacctacctctccccatactgcaggtgtttggtcatggaaaggccaacggggagcccacatgggccctgctgctcacggctctcatctgtgagaccggtatcctcatcgcctccctggacagtgtggcccccatcctgtccatgtgagtagcctgcaaggacacagtttggagggtgtgaggacttggttactgttccttccgatctgaacatagggtaaggactaaagatacataaagggtaggcacagaaggccaggtggctatgctgtgggcacacagctgttgggccagctgaggtgagtgtggctggacagacagctgttacggtaggtgcaatggctgtacctgtggtaggtgacagggacagtaagcatgcgacttattcttagggtccctcagctgctgtgtagagacccctagaggagctctattgtgtaaacaggttgggtctccctaaagagtggtaagcagtagatgatagacagtggcaggatactactgtgccttcgtgggtggtcagcggcctcattggcccttctgctctaggttcttcctcatgtgctacatgttcgtcaatctggcctgtgccgtacagaccctgctacgcacacccaactggcgtccacgcttcaagttctaccactggtaaggccttctgtgtggacgccccgagggacccacaaacctgagcacatgcaatctgttctggaggctgcctgctgctaggcttaaaactgttttggtggaaggagacccagtgaagtctaggaggccacggtcctgtcctggcctctgacttatatttcctttcctgagtacacgtgtgattcttatgtcagcttggtcctctccagccagaaatgtttggcaatcccagagctgccagtgttcttcaggctcctttccagcacagtgctggctgggtggatggagcccattctgtgttctgcacgtagctgggtgtcttgtgcaccccaggagggaaacagacagttgcactgtctccaggctgcagctctgctgtgccacagcaggatctctgggagccatttcgtatttcagggatgactgagtggcagacctggttgccaggcgtcatgggctgatgctctgttcaaggaagagttgcataatagggaaagtgctgttggtgaagcaggctttcaggtgccatttgggggctgtacgggcctgttctgaacttcatgtccgccaggaccctctccttccttgggatgagtctctgcctcgcgctgatgttcatctgctcctggtactacgcccttttcgccatgctcattgccggctgcatctacaagtacatcgagtaccgcgggtgagtggcagcccctcagaaagctgtgacttcactaccctggggcatgagtctgggtgctgctgctgaggtctcatggaagttagacaccctgtgagtcctaggtgtcttgtgttgtcccctagtcccagccaggctgacgtactcgggtatatgctgaattcctgcccgggagttactgtgcagaagctgggaagggtttttgttttttgtttttgttaatttcatgtgtgttctaatttattaataggcacatctatggcttccactgttgacagtctgtttaaaggatttggcacctgtcaaccatagcactgtcatgtcccaggagctacgttaagagttccatttccaccaagttacctttgtccttccctgacatttctgtcttcactctggtccttgagaccaatctagttcagggcttccaagtcatgatttcagcctcattcttctctctgtccctggtgtccccagtgaatggtaccacaaggaagtcctgctgctcgaaccttttcattttatccagtagccctgcttgtcctgggaagccccttcctgttgggtttacacacattgtgactgtctcagctatgtaaacattcttcaaagtgctactgtgacaaggtgaccttcctctgtacccatacagggctgagaaggagtggggggatggcatcaggggcctgtcactgaatgctgcccgctacgccctgctgcgtgtggaacatgggcccccacataccaagaactggaggtgagtatgccccatagccacagtgccaaggtagcagagtggagtggagaccctgatcctgccaactggttagcgctgtcttggaagcttttactcttggccttctgaggagagatctgacagggcatcactgccaaagaatgggagaatagccagaggtgggtcctggatatccaacaagccaccagcagtatggattggaggcatgctcctctacgggagtttcctctgttctaaggccaaccttagctgggacacctgaagcctcagacacaaggtcctaccggtcccatctgccccacctgtccttcttattccacctggtcttcctaggatgtctgtctacttgctctcccatctctatcccatctggctccatgagcacgggagccctgtgtgtggccattgtaactcctgtccctgcctatcctaccacaggccccaggtgttggtgatgctgaacctggactcggagcagtgtgtaaagcacccccgcctgctgtccttcacctctcagctgaaggctggcaagggcctgaccatcgtgggatctgtgctagagggcacctacttagacaagcatgtggaggcccagagggctgaagaggtaggcaggcaggtggagtgcagagtgagtgaggtccgggttgcaaccacctaagaagagctgagccacggcctgcatctcgaggcttaggggcacgatttttacacgtgccgttcctggtttctgtcagggtggctactgagtctgaaaggatcagaagtaagatttgaagagatgagatgtgtgatctcctgagacagaggggcagtgacaactgccatgggactggatccctgagggcccctgtgtctagccttggcactttgttcctggtgtctgttatagctccctgtgcaccccagcaccttctagtaggtagagattgttgggtcatgagtctgtgtgcgctgggctgtggtggcgcacacctttaatcccagtacttgggagacagagacaggcggatttctgagttggaggccagcctggtctatagagtgagttccaggacagccagggctacacagagaaaccctgtctcgaaaaaaaccaaaaccaaacaaacaaacatgagtctgtgtgctgtcagatgttctgatcctttggataagaggtgagtaaccagaacctcctcctacagcatactggagccatctctgatgcctgctgcccacaatttgctggtcctgtaactcctgggcttcttctacacaggctttcttatttctctgtgatcagttgtgacaggaaacctccagcccaagcagaaacagaacaaatagtgtcaccagtttctcatgtccatctacagcctctgctgtcctcacaaggccaggcagggtcctgccacctccagtgttcagctacccagattgtcagaaaccttttttactcctctctctatatttgtggatcttacctaaggctccatcgtagctgccgtgtcttggtgtcacccttttctctggaggggttgatcagcgagcatttttcttatggctatccttatctggtcttgcttgtgcgttcaggcttcctgctgtctgtgtgtctctaagctgcatcccaatttctgagtccagtccattctgggtggactgtggagtggactctgtggagtgtattctgaggactgactgtgggcattggtggtaatgactattgataactctggtctggagtgacaatcttgtggctttttcagtgatgacattacttgcccggcctgcctgtcaggcagctttgagattcggcaagatcaaagaggacaagagaagagatggatcgttttcttgctcctccaaaagaaccagcagttgccccttagaatgtggagcctccgatccgaaccctggctgctgctgactgcaaacccacgaatttaaacatcatagctctagtccttacggatgggtggttttctgtcttgtcctttggtgtctgacctgtagctggtctgaggggcattttgttatgggagagagagtggctctgtcttggaggtgctcttgtttttatctgtgatatttcttgggtacaaaaaaggccagcatctgctttaagcaatggtatgctcatgtcctttcctggtgtctcctctacactttagaggggatctctggagttaaggccaccctttggacagattcgaagggtgtgcatggactcttgtttgttatctgatgtcactggcagaacatggggaaaggtatttgtgttgaagtgagtgcctgctggggaccctctgactctggtttcaatctccattctgataagaaatgagaagagtatctgtggccgggcgtggtggtacatgcctttaatcccagcacttgggaggcagaggtaggtgaatttctgagttcgaggccagcctggtctacaaagtgagttccaggacagccagggctacacagagaaaccctgtctcaaaaatcaatcaatcaatcaatcaatcaatcaatcaatcaaacaaacaaacaaaaaccaaagagttcctgtggctatctcatgtatgtctgttagattaatttatattctgtagtgctggggtgggacccaggaccccatatgtgctagacaagtgctcactcagccactgagccacactcaaaccctggttggatgattttaatctctatttgcttttaggcagaaggttctaaagaatctgaatcaggaacatgtgttgagaaacagaagccaagtattcgcctctcctggtacccataggaaaggtttagcattggaattagtcatttttattgatcagcaaaagccagaaggagctgcccaagggtccacctgcccctcctgcctgatggagctctgccctttagtcggactatcagtagtaatattaaacgaagacagtttgggaaagccattcattttaagtgatcagagcttgtgtaagaagcttgttctgggcatttccttactatgtcagggttaatatcactttccctctactgcagcatttgcatgaaagggcttgagggtttgagtcaccctatccttccctaactaagggtcctgtcttcctcttctgtgaggtttccctgcccacagtggctttggcagatgtgccaacttcttatctggaccagattcctgcctggtcagggctctgtcctctaaaaccttaggctgggcaggcgattctctagcagtaaggcaaaaactaagatccagctccagctctttgggtctagcctggggaaagcaatgttgcagcctttgtcagggacacaggcatcacaaagccagggcaggggtgtgtaggtaccgtgtacggtaggcatatccttctggtcagtcctccgcagtgttcctctgtgctgtgacctttagccagcttcagcccataggaggacagagtagccctgccacacacatgccatcgagctgagtcagcctctccagtacttctcctatgaaacccccatcatgggcactgtccttcctgcctgggagcagctgtgtccctgtgaccacgcctcccgcctgggctgcctctcaatcactggcatgttccccttttaggacagtgtgtttagattgtttctgaattacgcagaattctataagtggaacatgttcctcttgtgagcctggtctaccctagatggctggctggtggttggtggaggtgaacacaaagcaagggtagaggtgaaaggatggctgggaaccgtgtgtattgtcagtacagctttagttgtggaactgtagtgcagggcagtcattgtgggaccaatataggaggcagtcgaaatcaggcaaaggagggagaatagtgagtcttgtgaccagtggagcaaacctagactaggtgaagtctaaatttgaggtatgggcagagtgggctcaaatcactttctccctcttctggctttgctggggggggggggggctccaggcattcctaggcttagcctgtctccacatggctgccttccttctcagatctctctttcctccgtcttctctgagttacttgttactgagttcagggtcccattgaacagttaggatactttttccaaataaggccatgtttccccattttggctgtagcacggtcaaaacgaacccctcttgggaacaccattcaacccgtcactgtcctcgttccccaaacacatctccctcccacgcaactacattcgttgcactgcagtctccaaagttgtaagcatcaacaagtctggacctcgtcacaggccacaccgaaacggactcctctctgtgcttattaccaagagatgtggaaaaacgtttgcctgacggtgaccacatggtcttcctgatctaaaagggagagcgagcgcaaaggcatgagggtcaccgtccacataagtgtgaagtctagtagggctgttcctctaggtaccatcagataccctgcacccaacaggacctagtaggctgcctgctgtagaaggacagcatccctaggctgttgactcgtgaatggtgtgtcctgagtcgtagcgtacaatctctctctccattgtccctaagcagctctggggagggaagagctgtcctggtagatgcctgacatagtgatggaatgacgggagtggacaggtgtggagactgacatggtggcttgtctgatagcccttactggagcattccattccctcaaaggctgttaaagtcggtccatgaagcatggcccatgagtgttggatgcttattctttttaaaagatttattgatttttatttgtatgagtacactgtaggtgtcttcagacacaccagaagaatatgtgtggggctgcctcactgtagggacgaagggcatgttgtccctggcatgtgtcttagcatcctgtactaacacctgcctccacaactcccacagaatatccggtctctgatgagtgcagagaagacgaagggcttctgccagctggtggtgtcctccaacctgcgagatggtgcgtcccacctgatccagtcggctggcctcggtggcatgaaacacaacactgtcctcatggcctggccagaggcttggaaggaggcagataatcctttctcctggaagaactttgtaggtgggtgtggcaaccatgcccatcccaagtgttactgtcacactaagtgtatggccagaaaatatagacttggggccttggaatgtgctggccaagttgttagttacagaaaaagcaaatggcaggtttgcattcttgaatactctcctctcatgcccaagcccagtccccatgtggggattttcctagaatgtgacacactgtcctctggagatgatggaatagctctgatatggaaagttgttctttgatgcctccccgccaccccctggttagatgacttcatgggaccatgcctacttagcttgtgacagtcttcccactgtctggagggaagctagctccctgctcatcccctcatgagaccccatggtccagctggcccttggtaacttacccatggatacctttctccacagacacagtccgtgacactacagcagcacatcaggccttgttggtggccaagaacattgacttattcccacaaaaccaagagcgcttcagcgacgggaacattgatgtgtggtggatcgtgcatgacgggggcatgctcatgcttctgccctttctgctgcgccagcacaaggtgtctgtcgtaggaccataggccaacagctaggctacagggacaccactatgtggagggtgtggccttgcctgagttcctgcagaaatgtcccccctcttccccaggtgtggcgaaagtgccggatgcgcatcttcactgtggcccaggtggatgataacagcatccagatgaagaaggacctgcagatgttcctgtaccacctcaggatcagtgccgaggtggaggtggtggagatggtgcgtgcacagctgtgtgctggggacgggagggtgcagatgggcagacagacggatggacggacttggatgtcatgctacacttttggaataacagagatagtacatcccggcatgttccatagggtagcacttgtatagtcttactgttcccatcctacatctgagcttgtctcagctgacagcagctctggtggagaaggtctgtggggtgtactccctgggagtgaggtctgctcagaggtctggagcctggggttctagttttttgttttgttttattactcactccattcgtttacatctcaaatgatatcccatttccctgctaccccatcccacaacctccctcccctttgcctgtatgatggtgctccccgacccacccaccctctcccaccccaccccactcctccagcatccccctacgctgggtcatcagacctccacaggaccaagggtctcccctcccattgatgtcagacaaaggccatcttgtgctacctatgtatctggagccatggattcctccctgtacactccttggttggtgggttagtccctgggagcactgggtggtccagccagctgatgttgtttttcctgtggggttgcaatccttctgccagctcccccaccagggtccctgagttcagttaagaggcacttgctgacaggagcttgatgtggctgctccttgggaggtttggccagcaactgaccaaatcagatgtggatgcttggggctctgtttttgtccatgacttcatagttcctcaactagaaattatttgcctatctgtggatatatcgggccatgagtgaagtcatgctggggctaacagatagaataaagtgaccctgggtcacagtagatgcggtttactgtgtctgaatgactaaggagtgaggttcattctgagatacccactccagctgcccctgaggacccaagattgttcctactgaccgagcagccccttgtggattgactgtgtatcctttgctccttcctgccttctgctttctctgaatgctatgttctcacttgtgtggtctctatggcttactcctctgtcacctgatcatggatgacacccagtacacggtctctgcatggctatgtagctcagtttctggagtagaactggcagagagtcacattggatagaaatagtcccatagaggcctgcttctctacagtctcacagagggattatgttagaggggtgtcccagaagggcccatttcttttccatggccatgtggagtgcctcattgggtaaagggacctcccactacccttcatggtcacatggaggagtcccagctccagggctgcagcggtgcttctttgctggagcttgcaaactgcctttctctgcctgtgtctctttaatcatggatgaggtctggcatctctctgcattattgacgacctcttgcatcttcttgtcagctcccagggaaccttgtggtatgggtttatgttttctcattcgataggagactatgtataagactttgagacctctatgagagttttgggtatgtgcaggttggggcatcactgggttttgttgctctgggtgtgctgttcagaaatgcatatccacatttggacatttctcagccatctggagttgcagacccgctctctgtggcttctgtttgtaaccttctctgtaggtggcactctaggtctgtctgcattattagtagtcagaaactacccttttgactaagtaacagaagctgcccagacggggtcttgtgaggtagtccaggctagacatggagaccagcagtccactggcctggaccagtgtctgtaatgtacaatgcatgagctgcctaagctctcagcctcgggcttggcttctagagctaatctccctatgagttcccactagaatacagacctctgtccctaccctggggacatggtcaactgacaaggggctacccagagtgtaaggttttaggtgtttgggtgtaactggcagggatagtctgaatgccaacattcaggatcattagatcactagtgcttaaatgctgctgtccttggtttggtatcttttccctgtgaatttaataactctgtgaagagtgagcttgtctgagacaggaaatgacaccagttatttaggaatatgtgttccttgagaccacagctcttacagacaagccaggaatgccctgtccagaaccctgaacagctctgtgcttagtcagtgtgaactgcagcatcatcattgacagtgtggtgatgtcacagagtccccagcaggaacttaggtaggctgttgtatttgtccacctgttattgcaaaccacacatttgcatcaatagtcacacattctcatgccttcccaggctctgggatagagagctctgatactccagggacagaaatctaggcctggcgtacacggccactgcttgcttaggtccacttgacaatggggattgggtaggttttggttggcggcgacaccatgttttgtatgcattgtttacttctgtgacttgacgctttttaggttgaaaatgatatttccgcattcacctatgagaagacgctaatgatggagcagaggtcacagatgctgaaacagatgcagttgtcaaagaatgagcgggagagagaggtgtgtgcactggggagaaggtaggtagggtcagtgccatctggtcccaaacatgggctctgtgttgaggggagcagagcaacctagccggggaaaaaaaaatggcactggattcacacagttcctatggcatttggctttggttgttaatgaagagcaggcatggccatctgtgccctttgatacagtgtgactctgagggctggcacctttgtagtcacttcagatctttaaacattcacttcactccgtcaatgcctcagccactgagggggctgtgtaggtagacactccccttgttcacccttccagggctatcaggcaccacccatctatgaccctttaaaacccctgtgagcctggcagccagaggggttgttgaagcaggcccctccctgagatggaagctgccacagaggtgtaccatggtgcgtcctcgtcagggttgagtgactgagaggccaggggctacaccacgtaaggagactctggtaccagtgttctgatagttcagcagaggtctgggtccatttatttttttctttcaaggtgggaaagtgaggtaggaagaggcaggggagggaaccaagagtctatctggtagtacaagaaacgggagatccttttgggatggggacagtgccagagccctttgtggaattattgtctactagttgaggagtcttattagccagttacacatgaatccttttgggtcattctgcagcctgcctgcctcattgggcacgttctttcgagggtggctttcaagagcgagccactgtctgttctgacctgctcttccctcaccaggcccagctgattcatgacaggaacactgcatcccataccacagcaactgctagaacccaagccccaccaacacccgacaaagtgcagatgacatggacgaaagagaaactcattgcagagaaacacaggaacaaggacactggcccatcaggcttcaaagacctcttcagcctaaagccgtgagtgtctgtgtggcctgggccgatgcacattgaggacagatttccagccccaccttctgaggagtgttagagggcagcgcactggcccacagacctgcagagaactgggaccagccagcccaaggctatgctatcagtgccagtgggccaggtcatgagggggttgggctatgagtcttcctcgcttgaggataatgacttcccagggcccattcccacccccatagtctaggctgctgtcatagacctctggggtcctgtcatcttggttgatttgagaatcccaagactgtgaggtccttgtggctgtcacagagatatgggaatgccatcatggctgattcagttaagtcttcttgacacagcctccaagcccagtagtgggccagagcctcctctgactgggtctttatggtgggattattctgaaactccaagttccagggagagggagggtttaagggttctatggaatgggaatctattgaagggccaaggccagccatttcattacttagcatggccaccaccagtacttgaattggttgaatcgtgtgtggagtcctctgctggagtaacctgctctttgtgttctcttccatgtagagagtggggaaacctgtaagtgtactttcattttctagactgccttagaccgagttgccttgcatgcctgcgtgtgtacagtcctgtgtgtgtagaacatcctgctgacctcactgcctcccctcagagtggctcagggcacacacccagatgtcattctcttaagtgacaccaaaggcagtgtggaagagctggttctgagctgctctgagatggggcagacgtgtgtgcttcctgcatcaatgaacagattcacccacatccctccaggtctactcagtcaatatataattgcttccttggctctccatccatccaggaggctgccatcctttcctctctagtgagaagggttgtggatcaattctgtatagtcagactacctgtgtgtgagctctggggctggatgcagggccaggagtcctaggcaggggtgcagggtctgagggtctgcctgcaagcctataggtggaaacattctgggaggacatatgctgaggtcgcctggagatgctactgtggtcctttcatctgtgctgtccctgtcctgtctccctccagtcattctgtgccattgtcccttacagacaggtaatgtgcaagatgctggttaggtggttaatgactttagctgaattactcagacactgaggaaaacttgaggagcttggataactggggagctaagagcatcccaggcttccttcaacacataatcaggaaggcatagtaacagggtttgaccctacgctacttgtgcacatgtacctatatacacacgtgcctgtacataacagacagattcctggacacacacatgggcactatcggtgggatacttgcttgtcaggacccaagcttagccagggtcaggaagaagctccagggttcaggcctctttcttggttagtctagcaagagatgtgtttccttgcacaatttccttggagcatttatggcttcggatgtgtgctgggttagagtgcatgtatgtaccagttagaaaacatgtaaacatgtgtgcaccaggtaaagctcatgcatgtgttgtcagatgagcatgtgtgctggtttgagtatatttgtgttgtgtacacactagtgtacctacctgcatgtgtgtgtgggtatgcacctgttagcatttgtagatatttatgtgcatgtattttctactttggatcgtcataggcagttcttaggcagttctgccaatagccagctaaggatttatgacttcacttcctgcttccaagactgctgtgtagacttacactcccaggtgtagacactgtgtagaaagttcatcttgtacaagacattttactgatcaactctgctggattactaggaaaggaggtgggattgagttagctttcagaactcaaggacttttcctggaccctctggtggttttctagcttcaacagggcattccacaatggcataaaaaccaggcaaaacccagacctcaggttccgtgtgactgctgtactctcccatccccaggctcttgcatttcatgccgtttgagaaccgctgttggaccaaacacacagtaattgtgccctttccatggagtgaattcagagttcctgtaatgaaaggcctgactggtgccacagagactcacctataattttatcaaattaaactgaagagagaagataaagggcccatgactgttttcttcctggagaatggcagttacaggctgttatatttggcttagagttgagttgatcagtggatgtgattatgggacatctcgggacctctctatgaccctgaaatggcagcttcatctgcctgtccctctctctctgacgcacagatgcctctactcagaagggctgccatcaagactgtacaggcagattaacaggctaaaaattctgccctgtgtcctaagcccaaggacactccagatgtcccagtaccgatagaagtgcaatttcccgaggtagttttctaaacatcggttcagttctctagagcagggatgtttgctaccaaagagaaggctgacctctgtcctacaggcacctgagtgcttatgtgtgctagtgagtatgaacctgtgaaatcctcaaactatgtgggtgtggtccctgctacctgggaaactgaagagtacagggtcccatacaacaatagagcacttggaactcagtaatgttctgctcatctcagagaaacatgaatctgaaccatgcggtgccagaggctcttgtctctttgtcacaacttgatagtgtcatctggactggctaagggtaggaaagagggttgcctaaacccagacccagttctctgctgaatcccagcttccatacagcatctgacagaaccaggacggcagggtcattgactggtgagaggacactctagagctctcctcttgagcacctagtcctgactacacctaagtactatgtactcagttcaacagatatgctacttggcagcaccaagcatgccagtaggatgccagggattcagcagttgtaccagtgccctaagacacaggccagttcccacgcctgcccagatggctgctgtgccttccctcatatcctgtttctgcctgtaccaatggttgcttcgcaaatgcagcttattgagtgtgttgtagtttacctgcattactttatggtccctagaagcttagcggtttagtgatgctctgttctaaagtgtctagagccaaatgctttctgctgctaagtcaccccacaccccatcctaatatgctaagccttgcccttcccatgaacaagctgggaaggacaagcagactgcaggcctcaagcccactgtgcccactctaccatccttctcccagggaccagtccaacgtcaggaggatgcatactgctgtgaagctcaacggcgtagttctcaacaagtcccaggatgcccaactggtcctgctgaatatgccaggccccccaaaaagtcggcagggggacgagaactgtatccttttccaatgtttcccagtggtggtggtggtgagctgtattacaactgtggcactgtcaggcctgactcctcttgtttacagagcctcaactcctgtgagttggggacgatgggtcaggggagggtggggcaaggcaggcagtgatgtgtggtacaatgaggggtccacctaggcctgtccatgccaaaacatgcttttctatgtgtggtgtatcatgcattaccccggggaccttggacctagggacataggtaggcaagtgccatggcgtctgaccagactggggagggctagggggtgtcaggtccttcctagcattcgagttcctgaggatcggtgatggcccttccttacaatgctgggaccaagtgtagcacctagagtaagcgctctataaccccatcccagtatgtacctttgatttgcttgatacctgactaagccagagcaaatccacatggtgtgtctctgggtgacaagccttgatgcagagcagtatacactaggacacagactggggtcatctgaatgcccagcaagtgcagtgtgatcctaagcctgcctgagaagaacaacccctcacaggaagaactgagcccttgttctcgtgcatgtacctgcccatggtctcagtggttccgtgccccacagagctggcactggagcaatgctgaatctccctgcctggatgcagtatgctctgagcttagcctccctcggcggcagatcaagcaggacagatggccgcctgctcttccatttcacagttcaggctgttggccatagctttgacacgtgctttgctaagtgtcaggatatctctggggccttgttggacagccacttgggaccacggaatggcaaatgagggagatgtttctgtttcctggtcagaaaccactgaaccaccagggttccagtgacccagggttccaagtggatgggattaataactgaggctccagaaatctctctgccttctggaggtggcagctttgtccctgttctttcgtggtaccacatcatcatttcctctgtttggaggtccctagcttcttgggatgttccaatctgccacgggccttggtttctcagactgagtctgtaactggggtccctgatatgactagttgagattggtatggccttaactatcaacccagacatggagttcctcgaggtcctgacggaagggctgaacagggtcctcctggtcaggggtggtggccgagaagtcatcaccatctactcctaacacctgcaacctggacacacctggatggggtcaggactgtgcaagctgcctgtggccaggctgggactcgccagcatgccactgtgatagccactgctctggcactcattgcctggcctaccaacatgttgcagtgattctggtcaccctgacacacacggcttcccacagacataacagctcctaggcttcctccaaacagaagatgctatatggcggggagtatctagagctgttctggtaggaacggctccttacattgttgtcggcaatggtaggtatacccaggagatctggggcagctcttcctattactggcagggcctcgcctcctgacactaggatcacctttctgcagatggctgtccagcattttgtggcagttatattttacttccaccagagaacagtacaaaggcgcctctgtacttttcatgaacctgacagataaaccagaactcgtgaacaagcacacagttccttgggtctagaatgtcactgagttgttccccattggcttctttgttcctttgagtatccttgctgtgctttctgtacagtaagcacactgaggactgtccaccctcacctcctcattctctcccccaccctcctcagacatggctcagggtaccactggaaagtgagatagtgtttacagggtaggagtgggtcaccattggaaccagtggtacctgacagctgtgttcccatctgagtcgatgccctaggagctcctgcagagagaacctttgttctgcagggctatctgcagctagcctgctttctcttctcatgggaactcagccactttatttcatacgcaccgagctgggaacttcaagcaggtgactacggagagccacagtgtaacaagcaaacggcaggaactctgagaattctgcacatagtccaccacagcaggcagcatccagagtgtgaaccatgatgtgtctcagcatacagctttgcacatgaaatgccgtcccatccctcaccctcctggagagaaaagccaggcccagcccaacaccctcagcctcagcagccacagccctgggtgtgtgtctttctggctgagtgtctcctgccatagatccttactcagccgggggccataggcgcctctgcacttttcaagaacctgacagatgatttgcactttacccttgggcattctgctctgtaggtcatggtttgttcacaggctgtaggcaacagcactgatccgttcctcacgttctgtatggcgtatttatttatttaaccctccccggggaagcttgatagaggtggcttctatgtggatggcccgtggtgccaggctctgggcatctccgacttcctccaagagaatcagccctgtccacattcacgacgttccagttagggtagaggccacgtttgcacctgcacaggttcttcaggctttgttaggcacccaggtaagctcgccagagtgactgctgcccagtgtgtgtccctgtcagcatagtgatttccacacctgcttttgcctcaattctgaacttggctcagactcctgagccctggatgtctagagcagagcaggtggctcgcctcgcctctcccagctgttaggaatgccctgggcagctggcctttgcaggttctgggtcgctgcttacaagagatgcctgtcaagagcgtccagcctcctttctgttgcaatctccatgttcctggtaactgtggccgttcagatcagtttcatgttttttcctttttatagacttttgtctttgtatgactttgttagtagcagagtaaagttctataaaatataaatgtttaaggaacttcgtgtgcctcatttccatagaattcagtggtggcagaagcagtacttacctattccttcccagagctgctcagaggcccacttcaagactgaccacccaagaggctagaccacccagggctctcagggtcaggggtgaccctcctgcattggagaagctctacaaaaatacaaggggaactctcgtgccaacttagatttgtcaactcagtactgccattgtagggaatcaactcagaattttctaaggatgggagccccagaatcaccacagtgcaagtgaggctataatctagaaaatgggggacaggtaggaggtgttgagtcactgggatacagaactgtgcagccatgggactggtgttggcacctccgcagttgttaagtaggtttatctctatggcccaggacatatccccacaaaccttctccctggcattcatcatggtgtcttccatacccaggcattctgcagcagagcagtgtttggttatagaaacggggctcttgacccgtggcatcacgcacaagcctgggagacttactcagaagctgccccatagtatgggagtcctctcaggttgggtcccaaaagaagcaaatccaagaaaaccgtttgtaattcaaggaaggggggtagttcaggaaagactgccaaggaagcacagagctgcctttgggaggatgttctgatgtagaagcttgacatgctaatgactgatgagtgatgtagtcaccctgtctgtggtgagccttgaatatagtgggcacagtgttggctatgggaatgaactgggagagtagctgtcctttggccctactggggaccagagttctcatgcatgcatggcttagagcacataggcctggcattcatggtaatgattacaagttcaggcataggggtgtcattgggaacagacagacacagagaacagctcaggcatatatccagagtcctaacaacaggttctatggcaagtatgaagcttaggcaggcggtgtagtctttgtagcctgttacaccttgcagatgggactttgtgaatatcgtttgcctttgggggaaacaccatgctgcagtttccagatgtctgtcagtaactgatcccttctgcttaggacactaggaacaggaagggcagcaccccagaatacccctgaggaggggcttggctcactgacaaatcacatccatgatgatatcactgtagtgaggaaccccagggctggggatcagcacacaggccacttcatcaaaggtcacaaaaacatgcagctgtgaacaggcccaagggaatagcagagtggacttgcaggcggaaggtacaaagagtatgctctgtcacctagagtagaacaagggacaggcagcaggtcctcttgagctgcccagcaaaggcctgggctgtgttagttcacatggggatggtccaatggatgatgtcaaagacacagactccttattggttctaaagccagctgagaatggcagagactgccttctgctctcagaactggccttgatagcaggcaggagcagtctgcgtgtttatgagccctgaagagacagggttaccctgaaggtttagaagaacaaggaccttacacttgtctgaatttgctaggagacctcctatgtgtgaaaaaaggacacgaccaactcggggcagcaggattccagatcatacttgagaaattaaatagaaactggagtcaaaagattcaccctgaaagtgatggggtacctgctaagaaagggtcatcttggcgacacttcactcctgcgacagtttatttgggaatgtacatagatcgggttgttgagttctaagaatacacagtagccacaacctccacatacacagccaaggttggttattttcctcaccacagccactgtcgtctgttgccaggtactaccaactgccacagagacaccatcctggcacccagcacagggtggactaagcatcaccacctctatctttcttacctctgtctccattttcaacattgcagttttactactaggtagtcctggagttatcccaagccaagttcctgcatctcagtagatccactgttctcagacactagtgaccacgtccagagtggctacgtgctggagaacatgagcagtttggggacaggggaggcggtgtcactagatagtccagtctggtcttggattgtagctcttgatgtagcctcccacaagctctcactgccacacccaactaaatggtctgggtgtttctcatttacttcacaagtgctttcccatctctttaggtcttatcatggtacggagggagaactctcagctgtctggggtggtgtacccccctccacttaacactcacacagtggcaggtgctcggcccctgccatgagcttgtcagggcttccacctgccctgcatttttaaaacgtgaagccagggctcaggcttggctgaatctccccacttcccatgctgctgcagctggaccatggccctaggtgtcattggggatatcctgtaggacatctctcagggcctgaaaggacttttttttttttttttttgaaaaaagcttatgttcattggtgttttatctacatgtatgtctgtgtgagggtgttggaagccctagaattggagttacagacagttgtgaactgccatgtgggggtgctgggaattgagcccaggacctctggaagagcagcctcttaactgctgagccatctcttcagcctcctgaaaggacctcttagcacaagcccaatataagagtgctgcatactgagagagaaactgggtggccatgctgattcaatccctctgctgtggtgtgggtggtggaacctcacatacatgccatctctacatccatgacgtgggtactttagtcatgttgtaaggaaagggtgacacactctagtcattttcgttttggggagcatgtctagctaacagtgaacagcctacagaggactgatggtccccaggtcagagacatcacattcaggtcttcgggaattccttagaataggcacggggttgaggggaaaggagataaacataaggttgtgtcgcttctcaacagtctgcataagctggagcccacggagtccatctggagcttggtgtttcttgttaacatgagctgaactctgggtttagagttctggtttttcttagtctagaaatcccttattaagaagcattgctatggagttgtgtgcgtcaagcagtataagccaggacggttctacagcattcaccctccacaagtacctgtcatcttcacctgcagctacggtgtgtcagtacactacccaccgctctcagaaaagtgttttaatacaagggtatgtgtgccttgttacagaatgcacaattctttattatgccaagaaggcatcatgcccaactttcataaactcacaagaggttaaaaagttcctcttgttctgtcctgctggtggaaccatgaaaattgtggcttcttgaggaccccatacctttgcagcctttatggagggacatctaagtatcacttggctatgcacagcctgaatgaggacctccagcattgtacctgatccttctcatcccaacccgtctgggtcttatccatatctacctaggatgctggaagctcgacaccaagcctcatgctgcccacggaacgtcactctgtccctctgctcaacagtgccccctccacatttgctgataatctggcctctttgttttgctttgtttaacatggtacactgaagaagaaccactttccaagccagtccactgactttacaacatagaaacttcacaaaaagcattgccttttctattcaggtacccgaaggtcaaagaaccatgaggatacaaaggatgccttcaaatatcccatggtcacactgcagcaaaagcaggaacagatgcttttgtgccctcatgtatgggctttctggatgacacaggagcacgtgtccctggtaaccatcagctgcatcaaatgtactggtatccaaatggcatggagaaaggtagctttgtccatgaatatccaagcctggtgccatctccctggtgtgcccccttgacatctgcagctggtgttgagccaggggatgctgtattctctactgggcacatgccagcccctgctctgttcccaagggcatttgggcagagtgcttgtttgggtgctaggatgggtggaagtggtggtggtggtgatggtggtggtgctcatggtgatggtggtgttcatgcctctggaccacaggcatcacatagccctcaggccccagcatgggaggcaggtcccgtactacttcatgctccaccatggtaggctggccatgccccttaagtggtgagtggccttctctggctttctgccggtaccgcttgtgaccatagggctgcggtggaggctgtggtgggggctgaggaaggtggtggccatcctgagcactctggggcaatggcacggcctgcaggcaatagctgagagctttccctggcttgccactgcctggtgtcccaagaggttttcctggacccttaggagacctgaggaactgcttctcctgccccttgatccggggctgtgcagccagggcccgggtggcaggctcattagctggtatgacatgctcagccaggacttgagacctgcggtggtgtatagcgtgggcatccgactcttgtgatcgggacctgcttggaatgtgtgtggccctgccatgatgttcttgcctggcctgctcaggtggtgaccctagggacaagacaaaggtggtccagagtaaggcttgagatatgtcataactgtactatgggtttgcaatagagctggctttctgtctgggtcacgtctcagatggccacatgccccaagctgggcagggagaagtaaaagctcagccccccacatattttatactccatctgggtgtcagacacctcattaaagagcctgaatgtcactccttaaaggggtttggccactctgggattttactgcttgggtcagctggccttttgtccctattgtgggtcctattaaggagattctctactgggatagacagaacccttctaggatatgaggagggggtgacagaaagttatgtcactctagggggcactccactgagatgagatcaagcccacttccaggatagtctggttgcagcttcatgaaatgcttaaacccttaaggtcagccctatgcagtggccttagtacatggggccaattgaggtcacacttcccactaaaccctttagagtccctctccagatgccacccctccttccacccagcgtcagaggatcaaagctctagtacaaagcacatggagccagccattcccaagtgtgggtcaacttcagccagggacttctagctgatcagagatattatcacaatggacagattgcctgcatggactctcagggatgcctagtgtggatggggggatagtagaggacttggcctccagctttcagagtgccagccaggctgtagttcatgagtctctaaaggttacaagaggcacaaaaccagaaaggaacctcgtgtctacaatgctggctgtccacttgtcctcaagctggtaattctgccctaactgccagctccccctgctggaaggctcatgaacatacatctagtagttttatatcttccctaagccagagtatgtctcatacatacacctggatgttgaaccaccttgctttccaggccccttgccaatgacagaagggtaagctgtgagttcacatctaggcagaggataatggggcacccaagtggggtggggacacctggaacccaacatccagagccccttgcctacttgcaccttcagggagacatctatacccagagggtagatacagggtgggagtcctccagtacctaccaggaccaaacttagatgtgtagttctcgatgccagcaaggtctaggtagtggtttctgcgctctgtgttctcatccacacagtagggcactcgcacagagcagggctggggatcagcattgggcttcctgtatggagcagaggataggcctgacaatttgctcaaggccagactttaagtcatataacagggctgcttgcagaagtggatggtgttcgaggatgtctaaggagggacgttgactagtatccagtacccagagaaggcggaagtgacacagttggacaatgttgtatgttgtccagagaattaaggtccacaacccatgatggcagcctatcagcacccaggatactaccacatgtctcacagggcttgagtgaccctaaatttagggtgttctctgtttacctacctgggaccacaatgccccctgctcccttctgttggatagacatggtgctcagccccacaaggtaccctcactcttcatagcacacagtgtctacctgtctcagcaccccgcctgacaggacactggggaggctagcaggaagccaaccactgaactcacatctcacctgctgtaggcggatagccttctgtcagccactcggggctcatctgtgagctcaatctctgttctgccacgagtgggctcccggtctgaaagaaaggcatcccattcattcattcattcattcatttcattcatcctttgcagttcagttattcactcacccctgacccacctgcttatccacgcatgcatttcttctgcctattcatgttacaaatctgaacatccatccacactcatcacaggcatgctataaccagtgctgtccttgaactccaccccccatgttaaggcagagggtttattccacatcatacatcattatacaagacattgcctcttatacacggacaggggtgcagggatttgatagtttaggctgtcttagaagcacagtatgtgtggagttaatggtttaaaataaattaatggttagatacaaagaaaaatgactggatttgcagagcacatgtaacagaggcgaaggccaaattttatcagtgcatgggataaagtgctggggggagacgctccatgctgattatgaacagttaaaaaacaagttaaggctggccttgaacttttaaccctgttgcttccctagcgcttagattccaggcctatgccaccatgccctttgttaatgaattactttccttgctcgttctatccattcattaagcaaacagtttcgtcttctgccaggtgccaggttctgcttgggacattgtggaagcaagaagtttttgactggaagtagttagggaacctgaacaacactgatacccagggccagtggtggggagataacggtggggaagggcaagtgtaaaaagcattaagttaggtggctgagggtgtggcctgcccccgcaggcctgtcttaggggtggtgctgtccctgcaggcctggtttagggagatgctcatggagatgatattgtttgtacaggaaggctcctggcatagacccctcaccttggccagtgagaggacattccttcttgctggagggttcagggctgacagttagcttcactcgaagggtcttgctgctgccggaggagtgattgacagaggcatcgacaacctcgtagatggtgtgcatcaggctggacatgtcctggggccaacatgacagacttcaagggacagttttcctttccttaccaagcatgtattcaccccctgtccacagcaggcaccttgggtccatttactccccatcagacactgacttatacccagattagacccaggatgttgtacatggcttaaaggtagccctgctgtctgtccttgaggccagggttagcctaacctttgatttttatattctagaacattagacgagcaagcagataagctttctctctagatacactttttttcagcaccattgtcatggccaatgaagatgcttcctctgcctcttttagacacagttcaatggagcaaggacactccacaggcccaggctgcctggcctagggatgtcagagctatagaaaaagaccgtgctggaattggtgataagacttgtgcagactgccagagtaaggagacgctgatactagctaggtcaggatgttaaaatgggctctgcctccccttctgtcttaggaaagttctagtctcttctttctccccagtcagggctcactctgtctctctatctaaggattcagacattatctatccatctgtctactgaaccagattggttccagatctcaagaggtcttacccccgactcctcatcctatgggtggactgacagaggtgggcgtattacctctctggtgactttcccactgttgtcaaagtcatacaatgtgaatgtccattcttggcggttgtcttcttccactgagacgtcacactgcagtgcctgtaggcagcatgcaggggtaggaggcaaggaagaatcaactggcgcctgagacccgagtgccccaactgaggctcttcctggttgtcagccaggaagaggtagctcaggagaagttggcttgcatccctcaaccctgcttcttgcccacccccgccccctagtgaggagccgattccatgcttcatgactcagtttcccccctgtggcatctgtctctgctcatgcaaatactcagggtcacttcgagttggaggaattaggactgtgtgttcctgctgctcccctctgtcgttccctgaccagtagtgctagatacctattacatctgcctagcaacgtcaaggtcacagcaataccaggcaaacccccagagcatcacattttagtcctgtggtaaggcctcagagaggctaaggaaaccacagagctgggatgaccatggttcccatttagggccaccactaatcatgctggggcccagggagacacttacgcagatgtacacaggagaggacttacgtcaatgttcaagtgcttcttgctaagtctcagtggaccctcacggcttgctgccttctccccatcatctgtgctgaagagctggccctggccctcatggccctcagacttctcagggggcagcacaactgaaagggcaagaggaggtgagacaagggcctgtcccatgtgggtagcgtgactatcttgctctattctgttctacatgagctctgagctagagcctgctcctgtagaataggaaagtagtgagaagagagaggcctcacttgggttagttcaactatgtataccctggctgtactttgcagtctgtagtgactttcagtgagcaatctgtctcctctaggctgacattgtacagatgaggtgggagaaggaccttcaagatcaaaacagagtagtcaccactcctgagtcctccaggagagtgagtccctgtatccccaggttttctcctcattttctaatgccttcatccaaaacccactggcaaggccacatgtgggctagctgttggccaagcagtcttgtctcccctgacttccagtgtgaatggataagaagccctgtttctggggctcacatattctcagggtctcaagctgtgtcttgacaggggcccaggttgttggtcaggtgtctgtccaggtatgagctgagaggatgcccagtacctgagttgcagtaggcagtgctaggagtccctctgggcttcagcagatgtctgaagggggatctataggctagtgcacctactaactagaagccggtaagaactcatcacttctctgtgtggggctaactccaccaaagatacacacatatgatagtgactcaagcagggttcaagtcacagatttaggaccactccaccactccacaactggtgcagcaagtggccatgacattagctcaaaattcaagagcaccagtccatgcaacccaacctccccactcagtcccagaactacatacacaaaccactgtacagggaccctgtggctcaatattttgcttctcctgtggacatatccgagctgcctgctt

SEQ ID NO: 1133 - DNA, 5121 bp, Mus musculus
ctacgccggagtccggcggctgctctggagcagcgtgtggctgcgagggacagcagagtctaacggagccatgcccacgaactttacggtggtgccggtggaggcgcgcgccgacggcgccggggacgaagctgctgagcgcacggaagaacccgagtctcccgagagcgtggatcaaacctcccctacgccgggagatggaaaccccagggaaaacagccctttcatcaataatgtggaggtggaaagagagagctacttcgaggggaagaacatggcactttttgaggaagagatggacagcaaccccatggtgtcatcactgctgaacaagctggccaactataccaacctgagccagggtgtggtagagcatgaggaagatgaggacagccggaggcgagaggtcaaggccccacgcatgggcaccttcatcggagtctacctgccgtgcctgcagaacatcttgggtgttatccttttcctgcgtctgacctggattgtgggggcagctggtgttatggagtccttcctcattgtggccatgtgctgcacctgtacaatgctgacagccatctccatgagcgccatcgctaccaacggcgtggtcccagcgggaggctcgtactacatgatctcccgttcgctggggcctgagtttggaggtgctgttggcctctgcttctacttgggcacgacatttgcaggcgccatgtacatcctgggtaccatcgagatcttcctgacctacatctctccaagtgcggccatcttccaggcagagacggcggatggcgaggcggccgcactgttgaacaacatgcgtgtgtatggcagctgtgccctggcactcatggcggtggtggtctttgttggtgtcaaatatgtcaacaagctggcactggtcttcttagcctgtgttgtgctttctatcctggccatctatgctggtgtcatcaagacagcctttgccccacctgacatcccggtctgccttctagggaaccgcacgctggcaaatcgcaactttgatacctgtgccaagatgcaggttgtcagcaacggtacagtgaccactgcactctggcgcctcttctgcaatggctccagcttgggtgccacctgtgatgagtactttgcacagaacaacgttactgagatacagggcatccctggtgtggccagtggtgtcttcctggataacctgtggagcacatattcagacaagggggcatttgtggaaaagaaaggtgtgtcctcagtgcctgtgtccgaggagagccggcctggtggattgccatacgtcctcacagacatcatgacctacttcaccatgctagttggcatctacttcccgtctgtaactgggatcatggcaggatccaaccgctccggggacctcaaagacgcccagaagtctattccaacagggaccattctggccatcgtgactacatctttcatttatctttcctgcatagtgctgtttggggcctgcattgaaggtgtagtcctgcgagataagtttggggaggccttgcaagggaacctggtcattggcatgctggcctggccatctccctgggtcattgtgattggctccttcttctccacctgtggtgctggcctgcagagcctgactggggcaccccgcctactgcaggccattgcgcgtgacggaatcatccccttcctacaggtgtttggtcatggaaaggccaacggggagcccacatgggccctgctgctcacggctctcatctgtgagaccggtatcctcatcgcctccctggacagtgtggcccccatcctgtccatgttcttcctcatgtgctacatgttcgtcaatctggcctgtgccgtacagaccctgctacgcacacccaactggcgtccacgcttcaagttctaccactggaccctctccttccttgggatgagtctctgcctcgcgctgatgttcatctgctcctggtactacgcccttttcgccatgctcattgccggctgcatctacaagtacatcgagtaccgcggggctgagaaggagtggggggatggcatcaggggcctgtcactgaatgctgcccgctacgccctgctgcgtgtggaacatgggcccccacataccaagaactggaggccccaggtgttggtgatgctgaacctggactcggagcagtgtgtaaagcacccccgcctgctgtccttcacctctcagctgaaggctggcaagggcctgaccatcgtgggatctgtgctagagggcacctacttagacaagcatgtggaggcccagagggctgaagagaatatccggtctctgatgagtgcagagaagacgaagggcttctgccagctggtggtgtcctccaacctgcgagatggtgcgtcccacctgatccagtcggctggcctcggtggcatgaaacacaacactgtcctcatggcctggccagaggcttggaaggaggcagataatcctttctcctggaagaactttgtagacacagtccgtgacactacagcagcacatcaggccttgttggtggccaagaacattgacttattcccacaaaaccaagagcgcttcagcgacgggaacattgatgtgtggtggatcgtgcatgacgggggcatgctcatgcttctgccctttctgctgcgccagcacaaggtgtggcgaaagtgccggatgcgcatcttcactgtggcccaggtggatgataacagcatccagatgaagaaggacctgcagatgttcctgtaccacctcaggatcagtgccgaggtggaggtggtggagatggttgaaaatgatatttccgcattcacctatgagaagacgctaatgatggagcagaggtcacagatgctgaaacagatgcagttgtcaaagaatgagcgggagagagaggcccagctgattcatgacaggaacactgcatcccataccacagcaactgctagaacccaagccccaccaacacccgacaaagtgcagatgacatggacgaaagagaaactcattgcagagaaacacaggaacaaggacactggcccatcaggcttcaaagacctcttcagcctaaagccggaccagtccaacgtcaggaggatgcatactgctgtgaagctcaacggcgtagttctcaacaagtcccaggatgcccaactggtcctgctgaatatgccaggccccccaaaaagtcggcagggggacgagaactacatggagttcctcgaggtcctgacggaagggctgaacagggtcctcctggtcaggggtggtggccgagaagtcatcaccatctactcctaacacctgcaacctggacacacctggatggggtcaggactgtgcaagctgcctgtggccaggctgggactcgccagcatgccactgtgatagccactgctctggcactcattgcctggcctaccaacatgttgcagtgattctggtcaccctgacacacacggcttcccacagacataacagctcctaggcttcctccaaacagaagatgctatatggcggggagtatctagagctgttctggtaggaacggctccttacattgttgtcggcaatggtaggtatacccaggagatctggggcagctcttcctattactggcagggcctcgcctcctgacactaggatcacctttctgcagatggctgtccagcattttgtggcagttatattttacttccaccagagaacagtacaaaggcgcctctgtacttttcatgaacctgacagataaaccagaactcgtgaacaagcacacagttccttgggtctagaatgtcactgagttgttccccattggcttctttgttcctttgagtatccttgctgtgctttctgtacagtaagcacactgaggactgtccaccctcacctcctcattctctcccccaccctcctcagacatggctcagggtaccactggaaagtgagatagtgtttacagggtaggagtgggtcaccattggaaccagtggtacctgacagctgtgttcccatctgagtcgatgccctaggagctcctgcagagagaacctttgttctgcagggctatctgcagctagcctgctttctcttctcatgggaactcagccactttatttcatacgcaccgagctgggaacttcaagcaggtgactacggagagccacagtgtaacaagcaaacggcaggaactctgagaattctgcacatagtccaccacagcaggcagcatccagagtgtgaaccatgatgtgtctcagcatacagctttgcacatgaaatgccgtcccatccctcaccctcctggagagaaaagccaggcccagcccaacaccctcagcctcagcagccacagccctgggtgtgtgtctttctggctgagtgtctcctgccatagatccttactcagccgggggccataggcgcctctgcacttttcaagaacctgacagatgatttgcactttacccttgggcattctgctctgtaggtcatggtttgttcacaggctgtaggcaacagcactgatccgttcctcacgttctgtatggcgtatttatttatttaaccctccccggggaagcttgatagaggtggcttctatgtggatggcccgtggtgccaggctctgggcatctccgacttcctccaagagaatcagccctgtccacattcacgacgttccagttagggtagaggccacgtttgcacctgcacaggttcttcaggctttgttaggcacccaggtaagctcgccagagtgactgctgcccagtgtgtgtccctgtcagcatagtgatttccacacctgcttttgcctcaattctgaacttggctcagactcctgagccctggatgtctagagcagagcaggtggctcgcctcgcctctcccagctgttaggaatgccctgggcagctggcctttgcaggttctgggtcgctgcttacaagagatgcctgtcaagagcgtccagcctcctttctgttgcaatctccatgttcctggtaactgtggccgttcagatcagtttcatgttttttcctttttatagacttttgtctttgtatgactttgttagtagcagagtaaagttctat

SEQ ID NO: 1134 - protein, 1106 aa, Mus musculus
YAGVRRLLWSSVWLRGTAESNGAMPTNFTVVPVEARADGAGDEAAERTEEPESPESVDQTSPTPGDGNPRENSPFINNVEVERESYFEGKNMALFEEEMDSNPMVSSLLNKLANYTNLSQGVVEHEEDEDSRRREVKAPRMGTFIGVYLPCLQNILGVILFLRLTWIVGAAGVMESFLIVAMCCTCTMLTAISMSAIATNGVVPAGGSYYMISRSLGPEFGGAVGLCFYLGTTFAGAMYILGTIEIFLTYISPSAAIFQAETADGEAAALLNNMRVYGSCALALMAVVVFVGVKYVNKLALVFLACVVLSILAIYAGVIKTAFAPPDIPVCLLGNRTLANRNFDTCAKMQVVSNGTVTTALWRLFCNGSSLGATCDEYFAQNNVTEIQGIPGVASGVFLDNLWSTYSDKGAFVEKKGVSSVPVSEESRPGGLPYVLTDIMTYFTMLVGIYFPSVTGIMAGSNRSGDLKDAQKSIPTGTILAIVTTSFIYLSCIVLFGACIEGVVLRDKFGEALQGNLVIGMLAWPSPWVIVIGSFFSTCGAGLQSLTGAPRLLQAIARDGIIPFLQVFGHGKANGEPTWALLLTALICETGILIASLDSVAPILSMFFLMCYMFVNLACAVQTLLRTPNWRPRFKFYHWTLSFLGMSLCLALMFICSWYYALFAMLIAGCIYKYIEYRGAEKEWGDGIRGLSLNAARYALLRVEHGPPHTKNWRPQVLVMLNLDSEQCVKHPRLLSFTSQLKAGKGLTIVGSVLEGTYLDKHVEAQRAEENIRSLMSAEKTKGFCQLVVSSNLRDGASHLIQSAGLGGMKHNTVLMAWPEAWKEADNPFSWKNFVDTVRDTTAAHQALLVAKNIDLFPQNQERFSDGNIDVWWIVHDGGMLMLLPFLLRQHKVWRKCRMRIFTVAQVDDNSIQMKKDLQMFLYHLRISAEVEVVEMVENDISAFTYEKTLMMEQRSQMLKQMQLSKNEREREAQLIHDRNTASHTTATARTQAPPTPDKVQMTWTKEKLIAEKHRNKDTGPSGFKDLFSLKPDQSNVRRMHTAVKLNGVVLNKSQDAQLVLLNMPGPPKSRQGDENYMEFLEVLTEGLNRVLLVRGGGREVITIYS

SEQ ID NO: 1135 - DNA, 32351 bp, Homo sapiens
  misc_feature (1)...(32351): n = A,T,C or G
tgtcgtgtgccccgcccgtcccatctgccctgcctgttgatgggccgtgccctggtaagcgttgccgtggtaacagccgccccaccctggctgcaggccccaggtgctggtgatgctgaacctggacgcggagcaggccgtgaagcacccccgcctgctgtccttcacgtcgcagctgaaggccggcaagggcctgaccatcgtgggctcggtgctggaggggacgtacctggacaagcacatggaggctcagcgggccgaggaggtgggccgggcggggtctggaggccaggcctctttcccaccccagctgcacaggacacatgccctggcatgtcctcatcgcagcgtgtcaacacggtgctgtgcgtggcgctgctgtgttttagccgtggcggtggctttgagctcagagcagcgcgctaaggcctgggagcaccagccgcaccccgggaagcttgggaggtgtgagggccattagctttccaagggcgaaccctgggaccgcctcctcccgccatgggtgagccccgtccagagccgtaatcatggttctgctgcaagctcagtctcccgctgttcaggctcactgggggctgcataagtgtgatgccgtgtgctgggggctcactgggggctgcataagtgtgatgcccgtgtgctgggggctcactgggggctgcataagtgtgatgcccgtgtgctgggggctcactggggctgcataagtgtgatgccgtgtgctgggggctcactggggctgcataagtgtgatacccgtgtgctgggggctcactgggggctgcataagtgtgatacccgtgtgctgggggctcactgggggctgcataagtgtgatacccgtgtgctgggggctcactgggggctgcataagtgtgatgccgtgtgctgggggctcactgggggctgcataagtgtgatacccgtgtgctgggggctcactgggggctgcataagtgtgatacccgtgtgctgggggctcactgggggctgcataagtgtgatacccgtgtgctgggggctcactggggctgcataagtgtgatgcccgtgtgctgggggctcactgggggctcactgggggctgcataagtgtgatgcccgtgtgctgggggctcactgggggctgcataagtgtgatgcccgtgtgctgggggctcactgggggctcactgggggctgcataagtgtgatgcccgtgtgctgggggctcactgggggctcactgggggctcactgggggctgcataagtgtgatgcccgtgtgctgggggctcactgggggctgcataagtgtgatgcccgtgtgctgggggctcactgggggctcactgggggctgcataagtgtgatgcccgtgtgctgggggctcactgggggctcactgggggctgcataagtgtgatgcccgtgtgctgggggctcactgggggctgcataagtgtgatgcccgtgtgctgggggctcactgggggctgcataagtgtgatgcccgtgtgctgggggctcactgggggctgcataagtgtgatgcccgtgtgctgggggctcactgggggctgcataagtgtgatgcccgtgtgctgggggctcactgggggctgcataagtgtgatgccgtgtgctgggggctcactgggggctgcattaagtgtgatgccgtgtgctgggggctcactgggggctcactgggggctgcataagtgtgatgcccgtgtgctgggggctcactggggctgcataagtgtgatgcccgtgtgctgggggctcactgggggctgcataagtgtgatgcccgtgtgctgggggctcactggggctgcataagtgtgatgcccgtgtgctgggggctcactgggggctgcataagtgtgatgcccgtgtgctgggggctcactgggggctgcataagtgtgatgcccgtgtgctgggggctcactggggctgcataagtgtgatgcccgtgtgctgggggctcactgggggctgcataagtgtgatgccgtgtgctgggggctcactggggctgcataagtgtgatgcccgtgtgctgggggctcactgggggctgcataagtgtgatgcccgtgtgctgggggctcactggggctgcataagtgtgatgcccgtgtgctgggggctcactgggggctgcataagtgtgatgcccgtgtgctgggggctcactgggggctcactgggggctgcgttaagtgtgatgccgtgtgctgctgaatttctgcccactcagagctttgtggggagggacgggtgagtgccccgggcgtgtagcatgctggtgccagctctgagccctgctgctgcagtcggctgccccaggacatcggggtctgagactttgtgtcttcatttctctgattttcaaacttcttatgggaagcttcacactatccagaaacggaatgatgacacgatgaaagcctgtggggtcccatcacgtcacgtcacgtcacgtcacctggagttacttctgtatttcttgctaaagcagggagcttttgagtgcccacctgcgtgattttcatgccaagggcacctcattcccaggcagggctggctgccgtgggcgcctcgagcctcctccttccccctcatgtgtgtgggagtctgtggggcctataccacgtgcctgttgcagtggtgtgtgtccgaggtccctcccatgcgggtgccccctctgtccttgctgtgggttgggagccagctccctgctgccaggcccccactgggaccttgtgggtgtgtccaggcatctgcagccgccccccaccgcctccccggtccgtttctctgcacaaccacagccgcactgaggcccgtccaggtctgggccggtcagcctaggggtgggaaccctgctcaagagggctgtgggcacgtggatggtagcagcctcaggtggtgtggcctagggccaggatcccatggaggtaaaaaatggcccccgccgctcccgccacgttggccacgtggatggccaccttctcaggctgttgcacaggttcgccttcccagggaagacaggagatgctctgggccttccctttccctgacggcggcgtcatggctcaccacgggttcaggcgttagctgctattgactgtgaacccgtggatttaggtatcgtggttttcggggggatgttcacggtcctggtccccatatgtccctttccgtgttccttatcccatgctggaatgctcttaggaggaatcccggagttggaactgccctgctggcgtggattctaagaatcctggcactgcctggcctccctggaggtgtgtgagggcgcgtctgtgcgcacgagggacagggcagggattgcagtgactgggggatgacgggaccccctgccacgctctgccacagtcttcacggccatgggaagagctgcgctcacttatactctcacgttaacggagctcacaggcagatcctctccgtccgacagcccttcggctggggggtctggggcagcctcagacaggagcccgctcttgcggacgggaggacgagcgcaccctgcccccgctgctctcagcgagcctttggctgtgacttagctgcattggttgcgagggctggagccagccgcaggccccgccttcccttggctgcctttggggctgcactgccctggggagccgtattctcctccatcgtggctatgttagtgtgaaattagagaaatctgggcaaatcttttttatttatttgttttttaatttttatttattttttgagacagagtctccctctgttgcccaggctgcagtgcagtggcgccgtctcagctcactgcaacctccacctcccgagttgaagcagttctcctgcctcagcctcccagtagctgggattacaggtgcccaccaccacgcccggctcatttttgtatttttagtagagacggggtttcgccacattggccagtctggtctcaaactcctgagctcaagtgattcgtctgcttcggcctcccaaagtgctgggattacaggtgtgagccacggcagccggtctgggcaaggctgtaaagcatggacatttctctaagaagcgtgcagcttcgtgactcatgcagtcgccagggaggctcatgcgcgcccttgtgctctgttctgtgtggcactgattggcataaaaggggtcctaaggccctggtgttcttgctccccgctcgtaaagttgtcctccgggttgaggtctgtctgcacggaggcctctgcgactgctgcgccgggcaggtgcggggacttgtgataacagggtccccgacacggtgctgacttgtgataacagggtctccccacacagtgttgagttcctgccaggccagggcagtgccgcgtcctcctgaaaccctgcagtcctgcaaggtggttttcccaacagtgaggccagaagagagttgagatccccagctccgactcctcggagccagcacgtgggggtgagcacagcagccagtcatgtaggaagtggccccgtgacgtggctccagcacttggaggccctcagggcccctccagtggctgcatccaaacttggctgatcctgaacagccgtttccctgggctccgttctccggccagatcggggcacaagaacagagaacctgaattgccctgcagaggggtctcgtggggatgagaagcagccgcataaaggggctgctgtgtggcctttgctgaaatagccacacttcctgccttcttcccacatgacgcccgatgcgggggcttccctgtgccttcctgcccagagacggctgtgtccaccccgcagcgtccgcctccagccggtctctgcctctctggggcccctgcctccgcttgctggctggtgccccttgggggtaacgtgttcaggcctttcctgacctaaacaaaagtctcaaagaggagcatatctgctggccctgcaccctgtcccgtcttgcgcccgggcagctgggcagaaggtggaggtgtctggagagcagggtaaggacgaggggtgcctgaggaggagtggggccgtgggagaacattggatgttgttttgtgtgtgaagggctggtggagctctaggtgtgagccagggtagggggtgaggataccagtcaggctgacgtaggggctgctggaatctcggcaaaggaggcaggtggtggctctgatccctgagtggcccggggctgctgtgatgggacacagaccacacggctcacagcaaagggcgtctgttctctcctagttctggagcccaggagtctgagatgaaggagaccgcaggccacgctgcctccagagtctcccgggaggatcctcctgcctcctccagctcctgggcccccgggcgaccctgggcgcctgtgcctccacgcagtctcttcctcccagtctgagagctcttcctgccttcatcctgtaaggtcacttgtcagtggcttcagggcccacctctgacccaggatgctctctcaacatcataacctaattacagggttcttcaatacatccataaagacaggttttccaaataaggttgcattctcaggttcctggggctgggatgcgggtatcctcttttttggggccactattcaacccactgcaattgagctttcggccctaaaattcatatctgccacacatgtacagtatgttcaccccatctcagtgtctcctgaagtctcaggcctgcacagaccagctctgagtcccaactctcatgtaaatctcattgctcggagctcccaaatctcatcctctaagcatccaaaccagaagccagtgaaatgtggggtctggtccatcctggacaaaactgctgtgtctgtagatgtgcaagtgaggaggtggttatcccagaacgcagcaggggacaagccaggagaggcatgtttgctccaaaagggagaatcaggtgggaaggggccactggtaccacacaaggctgagacccagcagggcaggccctggggttccagggcctgaaggtcagagggtgggaggcctgcgtccacacatgcatggctttagtgcgtggcaggtcctcggccacgcacgtgcaaaccccatggagtcaagccgttccgtggcgcagcctcatcagacacccctgggaagagactgcacacagcagtgaccccctccaaccccgggaggagaccacacggcagtcccccacccccgccccccgccgttgctgttagggtgctgcatcctggaccccacggcctccctttgaagagctgctaatttggcccattttcgggtgtttctgatgcaccaggtggatgaacctggcccagagcgtccgagtgaactgggggtgggtctgggatgttgtggatcgcctcagagaactgcctggcgttgtgtccccagagcagccctccacatcccctgcacgtggcatcagtcacacctgctctgtgtctctctccccagtgtgtgagcacgcacatacacacatacacacacagcggccgggagcaccgcagcacaccgttgagccttcgggccttccctcctgctgggtccacagaggaggtggtgcgggtgccctggccaccgtgggtggtgggcgtgggtctgtgcaccccattcctgctgtagcaccaacctgtcctgtctcccgcagaacatacggtccctaatgagcacagagaagaccaagggcttctgccagctggtggtctcgtccagcctgcgggatggcatgtcccacctgatccagtcggccggcctgggcggcctgaagcacaacacggtgctcatggcctggcccgcatcctggaagcaggaggacaaccccttctcctggaagaactttgtaggtaggcatggctggcggcccttcggcatcccctcaccgtcccctctgtgtcctctcagtgtcccctcgctgtcccctcgctgtcccctcactgtccccttttcgtccccactgtccccttggtgtcccctctgcatcccctcgccgtcccctcactgtcccctgtgtgtctcctcagtgtccccttgctgtcccctcactgtccccctctgcctcccctcgctgtcccctcactgtcccgtgtcccctcagtctcctctgcatccctttgccatcccctcgctgtcccctaaccgtcccctcaccatctcctcgccgtcccctcactgtcccctcaccatctcctcgccgtcccctcgctgtcccctcaccatctcctcgccgtcccctcgcggtcccctcaccatctcctcgccgtcccctcgctgtcccctcgccatctcctcgccgtcgcttcgccgtcccctcgccgttccctcactgtcccctcgccgtctcctcgctgtcccctcaccgtccccttgctgtcccttcaccgtctcctcgccgtccccttgctgtcccttcaccgtctcctcgctgtcccctcaccgtcccctcactgtcccttcaccgtctcctcgctatcccttcactgtctcctcgccgtcccctctgtctcctcgctgtcccctcaacgtccccaggcctgtgcgctgtcaggtcccgatgggccttgaggccaccgacccgagggtgtgtgctctgaggctgtcgaaggccctggccctgggagcggccatctgaaagtgtccaggcactccctccccttctcccagagccccgcaggggctgggggattccctggacacatgaccagcagctgaactctgctgtgagtctctggctggtccttggaggagctgacggagtgagggtgggggctttgtggggacccccctcgcctcgccgtgcccgcccctgcactggctgtgagtccccggggaggccccttccgcaccctggcctcagatgacctgcggacggccgcctctctccgcagacaccgtccgcgacaccaccgccgcgcaccaggctctgctggtggccaagaacgtcgactcgtttccgcaaaaccaggagcgcttcggcgggggccacatcgacgtgtggtggatcgtgcacgacggcggcatgctcatgctgctgcccttcctgctgcgccagcacaaggtggggcgtgcgacggggacacgccagccggagcacggccaccccacgtgctgcgggccgggacgggctcctctgaggccccacagccatgccctccctgtctgcaggtgtggaggaagtgccggatgcgtatcttcaccgtggcccaggtggacgacaacagcatccagatgaagaaggacctgcagatgttcttgtatcacttgcgcatcagcgccgaggtggaggtggtggagatggtgagtcccgagggcttgaggggaggaggccggggggaggtggggaggaggttgggggcggcccgggagggctgtgggcctcgtgaggtgggggtggagggggaagtggagatcgggagggctgtggcctcgtgaggtgggggtggagggggagatcaggaggtggaggtggaggtggggaggagaaggtggtggagaatgtggcggtggatgacaagcgatgcagaggatggacaaggaggcaaggaaaaaggaaatcagccagaacaccacagaaagcacagagcaccgagcagatagcacgatggacaccacgagtaacacggagcagcgagcgaagaccaagagccggcatcagcatcatcaagatcaaacaaggaacaccgagataaccacggaccggagaacacagaccaggacacaaacaacaccacagaggcagtagacaaggagggatgcacactcagaaccacaacccgaaaagggtgcacacacacaaaatggagaaacaccacacccacggatggaaaccaaacaataagcagccgagcacccggaggacaagggggcccaggggtcagcagaggccaggcagaagctgacaccgtggcgccaaaaaggccccgggcagtacagacaaaggccgaaaggcagcataccaccgaagcgtaagacccaggaaaaggaacggcagaaggcgcagccagcccgaacgaggccacaggacaaagaagagcggaaagaggagaaggacagaacgaaggacaagcaaagacaacacgaaacacaaaacccagagccgaccagaaaagacaacaggacgcgcagggaaggacgagacgccagacaaacggagagggaggcaggcagcggacggcccgggaaagcgcaagcgacgaccagagccaagagccgcgcaggagagggagacaagagagaggcaagggaagccaacggcaggaaccggcaccgacaggcaaagaagggcgagacaannnnnnnnnnnnnnnnnnnnatgtcgaccatcgcccggtcccccccacgctaacgcccatccacctccccgggccgcgccccgggccccccgaccgcggtcggcagccggcgtacggccgcgcgcctcttcgcgtgcggccaggccaggccgacggccggcggcggacgggccgcggcgacgggctggcgcaaggcggcggcccgcgcggggcggctcgggcgggggccggcggcgccgtgagtcctcggccggcgggggagatcaggaggtgacgctggagatggggaggagaagctggtgccgattgtgccgggggctgccaggccttgcggggtggtcaaggaggcttggttttggaatcgccaggacatcacagaaagcacagagccccgtgtgttgcttgtggacacctcgtgtaacacgggtgtgggtgttgccctagagccggcatcagcatctccgtgtcctccatggtcccgtgtcctcctcggcccgggaccccgtccaggacctcacacctcagtggtgttgccatggtgggtgcacctctgagcacctcccgttttgggtgctctccccagatgggctcaccttcccacggctggaaaccacacatcagcagtcgggacccggggagaggggcactggtcagtgaggccaggctgcagctgtcacgtgggacagacaggccctcggtcagctataggcagggcctggacagagactcgtcccgtccttcacgcctggagaggacggggttgatgggcggaggcctggcattggagcgcttgcccccggcccccaagcatggagctctggatcctgggggtctggtgggccccttgtgctggatggaaccatgcctgctcgctaccagcccacccggatccacggctgtgccttcccctccggtcctgctggcggtcccgggactttgtgggttctgaccccacttggatcacgccgacaacactggtcttgaagtcagaacccgcaaagtcctggtttcttccggctcccgtgaccccagcgcatggttttgcaggtcctcaggggcctggactcctggaggtgggtgctgggaagacataaagctggatagagactgtcacgctctcccccaggaagccacctgtgcccctgcagcagcctgggaggtgcggtctctccagccccgcagccccccagtcccccagccccccagccctgggtatggcagaggccccgagcacctgctcctggtttgtgtcgggctgtgagtgaggccaggcacggcttcgtgcctcaccgacaaccttctgtgtttctgtgtcagttcccgtggaactcagttgtcctgtggggttgttcttcctcttgccctgcaggacctttcctaggccgagggctgcaggcctgcgtgacgctggatggttttctgcccagttttgtacactgggcttagtttccatgtggctgtgtcttcggggacgatggctggagtttgtcttgtttggacgaggctttgcgggttcaaggttgtaggggttattattggtgctaatagtcgtatgaataacgttatttccaagtcataaaaccgcttagtaaaatagtaacaaaatgctgcctgggagaaccagccctgccagggggccaggtggggcagccactggggcccagaggaaacaggcaaagtgagcccatggccccagccgcacccccagcccctccgtggtgccagaagcagctccccagctcctgagcaggggttgttagctctgaagtccgggaacctggagctcccagcaccccccatgctcccagccatgtctctggcagggctggggctgcccacccctccgtagccctggccgcagggacaagtgccacctggctggagaggggcgtctgggtcgctgccattcagtctggcatgctgtttatttttttaaaaaaagttttgagacagagtctcgctctgtccccaaggctggaacctccacctcctgggttcaggcaattctcctgcctcagcctcctgagtagctgggactacaggtacacgtcaccatacctggctaatttttttttttttctttgtatttttagtagcaatggggtttcaccatgatggccaggctggtctcgaacttctgacctcaggtgatccacccgcctcggcctcccaaagtgttgggatgacaggtgtgagccaccgcacctgatctggtgtgctgttttaaatactggtgcttaacaggcacagctgctcccaactcccatgagccgggtgcggcgggtgagacacagggatcccgcacggcgggtgcggtgggtgagacgcaggggtcccgcatggcggatgcggcaggtacggcgggtgcggcgggtgagactcagggatcccgcacggcgggtgcggcgggtgagactcagggatcctgcacggcaggtgcagtgggtgagacgcagcagtcccacactgtggatgttccgggtgaggcgcaggggtcccgcacggtgggtgcaatgggtgagacccagggtcctgcatggcgggcgctgaggttgtgctgtggcttctccatgtgttctgggtgggtttcccatggtgccaagcccccctgagcatagacaatgacacctgtgagcgtggatcatgcagccccatggggcagtgcctcgccctgagccgtgtgtgccaggttggtttgtggctgtggccttgtcctcacagctgcccttgtgcccggtcagagggtcctggggagggacatgagcagagcgtgtgtgcggcgtgactgcccatcgtgcgctcacaccttcctggccactgggcggggggcctgagagccagagggggcctgtggggcctgggacgcgtggcctttcccaccgctcagggtggctcggtctctgggtaccaggctggtgttggagccatccgtggttctgtgcacaccgggcttactacgtgcttgggaactttctaggttgaaaacgacatatctgctttcacctacgagaggacactaatgatggagcagaggtcgcagatgctgaagcagatgcagctgtccaagaacgagcaggagcgagaggtacgtgggggccgtggccacagacaccaggctttctgagaagtatagccgacttcgctgagtcttttctgggaccctcctgcagcccacgacggtcctccagagagcatgcctcaggtactgcgtcgcaggctcagcccccagcctgcgtggaggtggcagaggccctgcaggagcacaggagtggcgtcaaagccagagctcatcggagcctgggcgtgcgggtgcctggttagaggaacggcagcctgccagatgcatgctcatgtgcaggaagggacgagggccgagacctttgaacttagcttttctaaccgagcagcgtgcaggcaggagacatggggaccctccccaagggcagtgccctctgacagggtcagcggcttctgagccggatgagtgcccacagctgcttacgatggctgctttgtctcacagcctgaaaccctggagcccctcagtgcccttccccgcagcatgcacagatttctgtcctgtctaagaccaagtgggaggggagagtgagtgtgcagggagggagggaagcgagctggaggggagttgccaacccccccaccccccaccccccgacacagacctgtgcagcctccgtgcgtggaagctggccgcctggctgcagcggctttggctccgtgggtaactgtaggctgctgaggacgtctgggtgtatccatctgagttatactggcctgggccccatggccactgtgagaccccaagggcaggcgtctttgtggtcacttcgcactggaggacagcacgggggtcacctggtagcgggatgctcagctctgtgaggtcacggcctcatggggtcttcgtgggtcccacttggctggtatcacacacgtgtgtgtgcagaccaggtgcaggtgttggttttctgagactgcagtgacggcggaggcaggggcagaggatttgcctgccctggggccttggcctcagcaggaacctgcagtacacgggtctgcgtgtggggccatatgtgctgacagccggaatcactaagcagcgactgctgctctcccccaacagagaaaggcgtgtggagctgcggtcctgtccactcccagaccccgggcaggtcagggtgggcacagatgcaggacacggggggccgcccagcttgtccgtggacagagaccccttccacgggggtccgggcagccgggagtgtctgggaggacccacatcctctgttttctgtccaggccaggtccctgagatccggcagggtcgccctggcgtcacaagggttcagcccgggtccagctaggaacaagaatccacccatggcttcatgggaagttcagtgtggagagtcagcaaatgctgaccgaggagggaccgggagcgggaacagcaagctcgagctcgaagggcccctcctgggccaggtgggggttggaggtgtcaccgctctgcagaagccggggtttggatgagctgctgtgcagacgctgggtggacaccctctagtgacttacacggtggccctcgggccaggtgggcggcgctggctctgccgagagcgggcagcccttgggctctggtttcacgttcaaggccatgggaaatttaggctgggccgggcgccacaatgagtagaggcctggggcccactgtctgtgtccagagagggaggcagccccaggccctcccccatctgtgccaatctcttccctttcgggaaggaccgacatccaagttaaacagttttatccggggaagaagaacctggtccagtgaaatcactctggacctttggctttttaaaatcaccccggggctcacaaactcctgatgcccctgggacgagtggctccccgggctgcgtcacaaactcaggcggggctccagccacagtgggagaggtggccattccggtgtgtgcataaataccacttccaaggtggcacccgtgtctgggagctcccattggcctacctgtcaggctggccacgacagcacggagggcgtgaagggtgcagggaggaatgagaacccagtggagggtgtttaaccaccaggggctgcgccattggtgcgatctcgcggtgagggcgccacttccccttcggcgcctacagctaggggcgtggacggtgttttcattttcctcggattgtcagaagtgacgcacagggggccggccctgtcattggccccagcggtgccccacagggcccctgccagcctggccggcccccaaacgtcccctggctggtcagacacagcctgcttccccggggacagggcctggatgctggtacggccccacctgccccaagcctccctgagacggggatgcctgtgggcgagcaggtggtctggggtgaacacgtgtgtggagccccgtcaggtgagggggagactctgccagcacgtgtcacctcctgtcagtacggggtcatggggcctttccagttcagggccagggcgggaaggtgagggggtgagcgtttggtcaggaagcctgggaggagggaggcagtcacgggggcggcgcaggaccagtgtgggacgccaggctgggtcctgggtcaggcacacagggcccttcaggttctgtgagctgccctcacctccggcctggcatcccgggtcgctctcgcccagaggagttttgagaccggctggtctcaccgagtcccgggcccgccaggcccagctgatccacgacaggaacaccgcgtcccacaccgcggcggcagccaggacccaagcgccgcctacgccagacaaggtgcagatgacctggaccagggagaagctgatcgctgagaagtacaggagcagagacaccagcctatctggtttcaaagacctcttcagcatgaagccgtgagtgtccgtgcgtgtggcctggggggaacagatcctggcagtgctggcccggcagtgaggacagagtcccttccctgaccactgaagagcttcggggcaaccctgcaggccagtgggcccgttagagaacagggagccgcctgagtgggcactgaggggtccttttggtgccaaggccgggccctgagttcagccctgtggccgggcgctgagggatccttctagtgccaaggccgggagtccttgtaagacctgggtgccaagtgctgaggggtccttctagtgccaagcgctgaggggtccttctagtgccaagcgctgaggggtccttgtaggacctagggtgggtcctgatgttaaccccacagctgggtgacgagcagtcctcctggtacctgggccagccctgaagtcagccctgcggccaggcctgctttgctcaggcaagcctcactgcagcaggcagatgggtctgttccatggaggcgaggaggcttgtgccgctgggcacagaattcctggccttcaccctgtgggtagttcaggctgctgtcgggccctagggcctgccctacgccaaggctcccacctgtggccttgggctgcgaacaccagggctgtacagggtccttgcgggtgtgggtttggttctgcagacgcagcctctgagttccagatgagagcgcaagagacacctctcacccggggtcagagccagaccctaaagccaggttctcaggaagggctgggggctcctgggccctgtggggtgggatgaggcggcgtcctcctgggcagccatgcgatctggaacagcctggtgctctctcctgaagtcagtaacacactcttgtttttttctcctgcatagagaatggggaaacctgtaagtccactcgctacaaccaggtcgccttccgggcccggttgccctgcatgcctgtgtgtgtgtggcctgcgtgtgtctgtgcgcgtgttctaggcctgtgcctgccccgtgcacggtggcttgtgtgcgtccgcgtacagccagagctcacccagagctgctgcggctcccacgtcagtttcctgttgccttcgctcccctctgttcacggtggctccagcacacgcctgaagcctcttcctaagtgaggcccaggaactgagacctgggaggtgtccgagccgctccggagtggaggggaggcgtgcgcctcgcagggcccgtcagtgagtccatccacgtccttctgggtcaggcgctagctgagtcgcgttcccacctggaatgccttccatgttaaagctgtccagcctccaggcggagaggggtgcagatcagttctctgtgtggtcggaccctcggcaggagctacctgcgtctgagctccggggcaggtgggagggtgtaccctggacggacccccagggtgctccctgggagtcctcgatgccgtctctgtcccctgcctgcccccgccagtaaccgcctgggccatgttttccttgtgggcaggcagtgcctggtgcctgagtgaggaacgccttggctgagtggccacacttcccttccctttttatctttaaccccgaaacctgaattaatcagactcaagaaactgtgcagctatgtgcgaggcgtgcagggaatccctgtacttcctgctccgttctgtaaatctgaaagtgccttcagaatagcgtgttaattaaagccgcagaacgacgtagacccaggagtagggtttgacacacacatgcacaggcacacacactcggggaccctcagtggcacctgtgcctcctcccagcgccggggcttgcctccccttggtcggggcgggggcaggtccccacaggcctgtagggtcaggagaaggtgggccagaatggacaacgcgtgggctttgtattcatgtgtggcgtgcgtctgggatggcattgactctcttggcccagcagtttctcggggttgggctgggagaagccctccgaagatctggaggtcggccctgacctcttctgggcagtgcaggcgtgagatgtgcgtggcttactgtgacgtccccgggagcacacttaacggatgtctgtttgtgtgcgtgctcgcatgtacctgtcagcgcacctgccggtggacgtgtacctgcctgtgtgcacgtccacgtacgttagtgtgcatgtctgtgtgcacatactatgcatgtcttacatgttagtgtgtctgcacgcatttgcacattgtgactgcatgcctgtttgtacatgatagtgtatgcacttgtgtattagtgtgactatgcctgtgtgtgtacacatcagtgtgtctgcatgtatgtgtgtgtgcgtatacacattagtgtgcgtgtctgtgcctgtgtctgcactggtcctccttgctgtggcggccggcatactccaccagtagccaagggccaggtctccgcctcaccccagcactcactggctgtggacacgctgcccactccgacccccctgtgctcctggcctgctttcacttcctggagctgctctttgtccccaaacacactggtaattgtggtctatccagaagtcgaattcaaagttccaagttcctggcacgaaagccccttgactgtgctgtggacagagaccccatctgtaattagaccaggctggagagaagatagaaggtctctccctgtgttcctcctggaaattggtggttatgatcacgtttatgtggcttaagcgtcaagcggatcaaagggcgtgagcctggatggcgtccgtggggcctctccgtgaccctgcgtgggcggcctctgtctgtccgccgccgcccctctgcgtccagggcgctggtgacctcccccagggggccacagtcacgaccgcacggctgcagctggcctgagacccgctccgactttcaagtccacacacgggccgggtttttccaacacagaaacgcaagtgctcccctccgcccagcgtttccccaggtggcctcctggaacgccagttctgctgcagtttaggggcctgcctaggaggggaccgtggggtagaggagggagataagctctgtcccgcaagggcctgagcacctcacagcatgattctgcagtgtccccaaacctacttggttggggagcctcctgtggggctgtggccgggcccaggccgccagggacgctttgagacatggaccggccacagcagcttcagagagcagacagggagggtcgtggagcagagctgcgttgtgaggacggaaggcgggggctggacggccacacggtggaagtgcttgtcctttagcccttggccagacaggggcagggtgggccgtaggaggggacccagtagtggccactgagggcctgtgcctccagctgagtcctcggcataccctgtccttgtcaggcctgggagcttcagcagcaacggctgcacaggccggtgtgggggactctgggcctttccttcctgagcttccggccccttggacccagttgtatcaggaccctcggagaggaggccatgtgtgcccagcctgacgggtctgtgtttggcagtgtctgacgtggggtttaggggcgatgatgtagatgtcaagagaagcgtgtcagccttgaaggcgtcaggcacatgggccacccagacggcttccactgttctgcctgctttgcagatgtagatgtagttaggaaagcgcttgcggtttgtgttgtgtgactgtagcccttagaagcttggcagccttagtgggctgagttctaggtccctggaggccaaagcatcccgctgctgaacgcccgccctggctgcagtcagcgcctttcgctcggagccgccacttctgcatccttcagggtcagagaatccgcctgatcctgactcacacagccctttccaacacgtgtgaatgcagctcatcagggctcagctcagcctcgtgtccggagcgtggggtgcacccgccgcccgctgaccgtgcccacctcccctgcagggaccagtccaacgtcaggcggatgcacacggctgtgaagctcaatggcgtcgtcctcaacaagtcccaggatgcgcagctggtcctgctcaacatgccaggtcctcccaaaaaccggcagggagacgagaactgtatcctttcttgcagtgtgcctgctgagcgtgcgggcaccccctggtggcttctcgctaagacctgggtttgtgggtgctgggagtgaggctggcttcccgcctctccttcagccccaggctctgggagctacgaccgggatgcagtggggctctgagcccagtggtgaccgggccagagttggggccagccctggcattggtgtgggggagggagggcccgcctacagtaccagccccactgtccgcaggtgctcagggctgccctggggctgggaggctccctgtcatgcatccccacagcagctgtgcattctgggacctccgctggggctcagccccaccctgcgccgacaacggtgggaggtgaggagcccagctctcggctttaaggccacaattggtcgcagctttgggaatttgtgctttggaaggagaactccgcagtgcatctgggcgtattggcacagacagggtgacgcctggcacatccctgccaggttggcaccaagaactggggccagtgagggcatgtcctccatgcgtcctgatcggaatccgtggcccaggtcccctgtaggctggtgaggacccagtcccgtggctggggttccctgtcgggtggggtcagcaccgtgggctgtgtcgctgtctctgctcgtcctccctgtggccacggtgctccctctctttcccgagcactggcccctctctcccctgcccctccccgcctggggggtctctctaatccccacctctcttttcaccttggctctgggtttctcaaaccaaatcttagctaaccaggagaggataaacctcactcctatcacgatttcagctacacacgctcaggtaagatcagctgtggccttaactctgttgaccacagacatggagtttcttgaagtcctgaccgaggggctgaacagagtcctcctggtcaggggtggcggccgggaggtgatcaccatctactcctaatgcccaacagcatcacggcactctgggacaggcacggaggacggcgtgggcagcctgggcctgggcttggcccagggaaacagacggcagacacacctgtcccccagtgatgccacccaagctgcccatggggcttcctacggaagtttctaggcccgtcacctagggctctcctgttcagccttaacaggctcagcaaatcagggcgtggctggacgatttccttgcatctgagggcagacgctgctaccggagtgacctggacgtggccagatcttctcgcaggtcacaagaagccagtgagcccttgccttggtttctggaagttcttttccttggctggatttacccagtggttaggttgcatttctaccccatccagaacattcttggaagagcacccggagctgaagctgtccctgatgatgaaggtgaaacgtcagccctggccatggctccgctcagggccccggtcacctccgagtcactctgttccttgactgtctttgtgtttctgtacctcaaggcactgaagctggaggactctgtccatgcccgtgtcaccctcgtgtgggagcctctgggctcggcaggtccacatttcatgagctgaggcgtgggccagggccatctggaaagggaactcggcttttccagaacgtggtggatcatctgtcgggtgtgtggtgaacacgttcagttcatcagggcctacgctccgggaaggggcccccagctgtggctctgccatgccgggctgtgtttgcagctgtccgagtctccatccacctttagaaaaccagccacttcttttcataagcactgacagggcccagcccacagccacaggtgcgatcagtgcctcacgcaggcaaatgcactgaaacccaggggcacacgcgcgcagagtgaacagtgagttcccccgacagcccacgacagccaggactgccctccccaccccaccccaccccaggagcacggcacacagttcagcctctgagctggctcacacgtgccatccccaccccggtgctccagggaaggaggacacggacccgacgtgggaggtcctcaggcagcagtggcgcctggtgtcaggtctgtctggctgagtcccgggcgtcccctgccatggcctgtgccttgcatggaggcggcggtggcactgaagagatagctttcaagggcccaacactttgcacttcggctggctgtgagtttctgctttgtaggttgtggtcacatttgcaggctgcgggcagtggcaccgacttgggcctccctttctatgtggcatatttatttatttaaacaccccagggagttacgtggtaacaaggttgtccataaagaggttgcttctatatactagaggccccagatggccaggccttgggctacgtctggcttgcatggtctcccaagggaatcagccccatcaacaaagttcaaatcggggcagaggctgcacttgtgcccccagatgtttctgaggagccagactagggctggcattgctgtagagtgacggctgctgcccagagcgtgtcccagacatcacagcggggctcagcagttcccacagcctctgcctgccttggctaagcatgagttaagcagcaaaacgctcctccatgtctggatggggccggcaggtcctgtgtcccctgcacctggaggagagcaggctagaggcacagcggccacatggtgctggctctgaacgttggttggtggctggaaaacagccctgcttctgagggccgctcagttctgcacacgaaaccacctcctgagggctcagctctgcccccgccctgggctgcagcctctgcacgcaagcaccaggcatcctttgtgttgtcaactccgtgtaaccagtaactacagccatttacaattgactccgtttccttttgtaggtttccctgtctgtctgtgttagtagaaaaataaaatcctatgaaatctgagtacgttgaagaatctcttgagtctcattcagcatgaaagacagctggagaaaatgtactggccgccccttttctagcaggagcgtcagggctgaccagccacagccaactcaggtggctgaagagtgaccatatgaattggacgagggcttccaaatcatgtcatcggcttggaaatgaccttaccccaaacttcctagtgctgtgtgttgaagtgacccaatctctgtatttctgagacagtctctgttgcctaggctggaatgcagtggcgtcacctcagctcactgcaacctccgcctcccaggttcaagctattttcctgcctcagcctcccgaatagctgggatcacaggcgtgtaccaccacgcccagctaatttttgtattttagtagagatggggtttcaccatgttggccaggctggtctcgaactgacctcaagtgatctgcctgcctcagcctcctaaagtgctgggattacaggtatgagccaccatgcccggccattcgatttataatttaatttatataaggatggaggcaccagagagtccgccatgagtggggacagcgtgttctaactcgtgagatgccaactcacacctgtgatggtcacagccaaaaccagagaatcgcggggaggacgtgcggaatcggacccctcttgcagggttgtagctgcacgggaagggcctgtggttcctgaaagtgtgagagacagagccgccccttccccggcaggtccactcctggtgtgtggcacagcctcaggaacgggtgcacgcaagttcacagcagccagaatggatgcagcccgagaacatgctgagtccatgtgggccgtgcctgctgcgggcctcactcagctagaaccaggagccaagcttggaagcctcacgctcgggaggaagctagacacaaagggtctcacgctgtgggactgcacttaacacgaaatgccagagtgggnnnnnnnnnnnnnnnnnnnnnnnnnnnnnnnnnnnnnnnnnnnnnnnnnnnnnnnnnnnnnnnnnnnnnnnnnnnnnnnnnnnnnnnnnnnnnnnnnnnnnnnnnnnnnnnnnnnnnnnnnnnnnnnnnnnnnnnnnnnnnnnnnnnnnnnnnnnnnnnnnnnnnnnnnnnnnnnnnnnnnnnnnnnnnnnnnnnnnnnnnnnnnnnnnnnnnnnnnnnnnnnnnnnnnnnnnnnnnnnnnnnnnnnnnnnnnnnnnnnnnnnnnnnnnnnnnnnnnnnnnnnnnnnnnnnnnnnnnnnnnnnnnnnnnnnnnnnnnnnnnnnnnnnnnnnnnnnnnnnnnnnnnnnnnnnnnnnnnnnnnnnnnnnnnnnnnnnnnnnnnnnnnnnnnnnnnnnnnnnnnnnnnnnnnnnnnnnnnnnnnnnnnnnnnnnnnnnnnnnnnnnnnnnnnnnnnnnnnnnnnnnnnnnnnnnnnnnnnnnnnnnnnnnnnnnnnnnnnnnnnnnnnnnnnnnnnnnnnnnnnnnnnnnnnnnnnnnnnnnnnnnnnnnnnnnnnnnnnnnnnnnnnnnnnnnnnnnnnnnnnnnnnnnnnnnnnnnnnnnnnnnnnnnnnnnnnnnnnnnnnnnnnnnnnnnnnnnnnnnnnnnnnnnnnnnnnnnnnnnnnnnnnnnnnnnnnnnnnnnnnnnnnnnnnnnnnnnnnnnnnnnnnnnnnnnnnnnnnnnnnnnnnnnnnnnnnnnnnnnnnnnnnnnnnnnnnnnnnnnnnnnnnnnnnnnnnnnnnnnnnnnnnnnnnnnnnnnnnnnnnnnnnnnnnnnnnnnnnnnnnnnnnnnnnnnnnnnnnnnnnnnnnnnnnnnnnnnnnnnnnnnnnnnnnnnnnnnnnnnnnnnnnnnnnnnnnnnnnnnnnnnnnnnnnnnnnnnnnnnnnnnnnnnnnnnnnnnnnnnnnnnnnnnnnnnnnnnnnnnnnnnnnnnnnnnnnnnnnnnnnnnnnnnnnnnnnnnnnnnnnnnnnnnnnnnnnnnnnnnnnnnnnnnnnnnnnnnnnnnnnnnnnnnnnnnnnnnnnnnnnnnnnnnnnnnnnnnnnnnnnnnnnnnnnnnnnnnnnnnnnnnnnnnnnnnnnnnnnnnnnnnnnnnnnnnnnnnnnnnnnnnnnnnnnnnnnnnnnnnnnnnnnnnnnnnnnnnnnnnnnnnnnnnnnnnnnnnnnnnnnnnnnnnnnnnnnnnnnnnnnnnnnnnnnnnnnnnnnnnnnnnnnnnnnnnnnnnnnnnnnnnnnnnnnnnnnnnnnnnnnnnnnnnnnnnnnnnnnnnnnnnnnnnnnnnnnnnnnnnnnnnnnnnnnnnnnnnnnnnnnnnnnnnnnnnnnnnnnnnnnnnnnnnnnnnnnnnnnnnnnnnnnnnnnnnnnnnnnnnnnnnnnnnnnnnnnnnnnnnnnnnnnnnnnnnnnnnnnnnnnnnnnnnnnnnnnnnnnnnnnnnnnnnnnnnnnnnnnnnnnnnnnnnnnnnnnnnnnnnnnnnnnnnnnnnnnnnnnnnnnnnnnnnnnnnnnnnnnnnnnnnnnnnnnnnnnnnnnnnnnnnnnnnnnnnnnnnnnnnnnnnnnnnnnnnnnnnnnnnnnnnnnnnnnnnnnnnnnnnnnnnnnnnnnnnnnnnnnnnnnnnnnnnnnnnnnnnnnnnnnnnnnnnnnnnnnnnnnnnnnnnnnnnnnnnnnnnnnnnnnnnnnnnnnnnnnnnnnnnnnnnnnnnnnnnnnnnnnnnnnnnnnnnnnnnnnnnnnnnnnnnnnnnnnnnnnnnnnnnnnnnnnnnnnnnnnnnnnnnnnnnnnnnnnnnnnnnnnnnnnnnnnnnnnnnnnnnnnnnnnnnnnnnnnnnnnnnnnnnnnnnnnnnnnnnnnnnnnnnnnnnnnnnnnnnnnnnnnnnnnnnnnnnnnnnnnnnnnnnnnnnnnnnnnnnnnnnnnnnnnnnnnnnnnnnnnnnnnnnnnnnnnnnnnnnnnnnnnnnnnnnnnnnnnnnnnnnnnnnnnnnnnnnnnnnnnnnnnnnnnnnnnnnnnnnnnnnnnnnnnnnnnnnnnnnnnnnnnnnnnnnnnnnnnnnnnnnnnnnnnnnnnnnnnnnnnnnnnnnnnnnnnnnnnnnnnnnnnnnnnnnnnnnnnnnnnnnnnnnnnnnnnnnnnnnnnnnnnnnnnnnnnnnnnnnnnnnnnnnnnnnnnnnnnnnnnnnnnnnnnnnnnnnnnnnnnnnnnnnnnnnnnnnnnnnnnnnnnnnnnnnnnnnnnnnnnnnnnnnnnnnnnnnnnnnnnnnnnnnnnnnnnnnnnnnnnnnnnnnnnnnnnnnnnnnnnnnnnnnnnnnnnnnnnnnnnnnnnnnnnnnnnnnnnnnnnnnnnnnnnnnnnnnnnnnnnnnnnnnnnnnnnnnnnnnnnnnnnnnnnnnnnnnnnnnnnnnnnnnnnnnnnnnnnnnnnnnnnnnnnnnnnnnnnnnnnnnnnnnnnnnnnnnnnnnnnnnnnnnnnnnnnnnnnnnnnnnnnnnnnnnnnnnnnnnnnnnnnnnnnnnnnnnnnnnnnnnnnnnnnnnnnnnnnnnnnnnnnnnnnnnnnnnnnnnnnnnnnnnnnnnnnnnnnnnnnnnnnnnnnnnnnnnnnnnnnnnnnnnnnnnnnnnnnnnnnnnnnnnnnnnnnnnnnnnnnnnnnnnnnnnnnnnnnnnnnnnnnnnnnnnnnnnnnnnnnnnnnnnnnnnnnnnnnnnnnnnnnnnnnnnnnnnnnnnnnnnnnnnnnnnnnnnnnnnnnnnnnnnnnnnnnnnnnnnnnnnnnnnnnnnnnnnnnnnnnnnnnnnnnnnnnnnnnnnnnnnnnnnnnnnnnnnnnnnnnnnnnnnnnnnnnnnnnnnnnnnnnnnnnnnnnnnnnnnnnnnnnnnnnnnnnnnnnnnnnnnnnnnnnnnnnnnnnnnnnnnnnnnnnnnnnnnnnnnnnnnnnnnnnnnnnnnnnnnnnnnnnnnnnnnnnnnnnnnnnnnnnnnnnnnnnnnnnnnnnnnnnnnnnnnnnnnnnnnnnnnnnnnnnnnnnnnnnnnnnnnnnnnnnnnnnnnnnnnnnnnnnnnnnnnnnnnnnnnnnnnnnnnnnnnnnnnnnnnnnnnnnnnnnnnnnnnnnnnnnnnnnnnnnnnnnnnnnnnnnnnnnnnnnnnnnnnnnnnnnnnnnnnnnnnnnnnnnnnnnnnnnnnnnnnnnnnnnnnnnnnnnnnnnnnnnnnnnnnnnnnnnnnnnnnnnnnnnnnnnnnnnnnnnnnnnnnnnnnnnnnnnnnnnnnnnnnnnnnnnnnnnnnnnnnnnnnnnnnnnnnnnnnnnnnnnnnnnnnnnnnnnnnnnnnnnnnnnnnnnnnnnnnnnnnnnnnnnnnnnnnnnnnnnnnnnnnnnnnnnnnnnnnnnnnnnnnnnnnnnnnnnnnnnnnnnnnnnnnnnnnnnnnnnnnnnnnnnnnnnnnnnnnnnnnnnnnnnnnnnnnnnnnnnnnnnnnnnnnnnnnnnnnnnnnnnnnnnnnnnnnnnnnnnnnnnnnnnnnnnnnnnnnnnnnnnnnnnnnnnnnnnnnnnnnnnnnnnnnnnnnnnnnnnnnnnnnnnnnnnnnnnnnnnnnnnnnnnnnnnnnnnnnnnnnnnnnnnnnnnnnnnnnnnnnnnnnnnnnnnnnnnnnnnnnnnnnnnnnnnnnnnnnnnnnnnnnnnnnnnnnnnnnnnnnnnnnnnnnnnnnnnnnnnnnnnnnnnnnnnnnnnnnnnnnnnnnnnnnnnnnnnnnnnnnnnnnnnnnnnnnnnnnnnnnnnnnnnnnnnnnnnnnnnnnnnnnnnnnnnnnnnnnnnnnnnnnnnnnnnnnnnnnnnnnnnnnnnnnnnnnnnnnnnnnnnnnnnnnnnnnnnnnnnnnnnnnnnnnnnnnnnnnnnnnnnnnnnnnnnnnnnnnnnnnnnnnnnnnnnnnnnnnnnnnnnnnnnnnnnnnnnnnnnnnnnnnnnnnnnnnnnnnnnnnnnnnnnnnnnnnnnnnnnnnnnnnnnnnnnnnnnnnnnnnnnnnnnnnnnnnnnnnnnnnnnnnnnnnnnnnnnnnnnnnnnnnnnnnnnnnnnnnnnnnnnnnnnnnnnnnnnnnnnnnnnnnnnnnnnnnnnnnnnnnnnnnnnnnnnnnnnnnnnnnnnnnnnnnnnnnnnnnnnnnnnnnnnnnnnnnnnnnnnnnnnnnnnnnnnnnnnnnnnnnnnnnnnnnnnnnnnnnnnnnnnnnnnnnnnnnnnnnnnnnnnnnnnnnnnnnnnnnnnnnnnnnnnnnnnnnnnnnnnnnnnnnnnnnnnnnnnnnnnnnnnnnnnnnnnnnnnnnnnnnnnnnnnnnnnnnnnnnnnnnnnnnnnnnnnnnnnnnnnnnnnnnnnnnnnnnnnnnnnnnnnnnnnnnnnnnnnnnnnnnnnnnnnnnnnnnnnnnnnnnnnnnnnnnnnnnnnnnnnnnnnnnnnnnnnnnnnnnnnnnnnnnnnnnnnnnnnnnnnnnnnnnnnnnnnnnnnnnnnnnnnnnnnnnnnnnnnnnnnnnnnnnnnnnnnnnnnnnnnnnnnnnnnnnnnnnnnnnnnnnnnnnnnnnnnnnnnnnnnnnnnnnnnnnnnnnnnnnnnnnnnnnnnnnnnnnnnnnnnnnnnnnnnnnnnnnnnnnnnnnnnnnnnnnnnnnnnnnnnnnnnnnnnnnnnnnnnnnnnnnnnnnnnnnnnnnnnnnnnnnnnnnnnnnnnnnnnnnnnnnnnnnnnnnnnnnnnnnnnnnnnnnnnnnnnnnnnnnnnnnnnnnnnnnnnnnnnnnnnnnnnnnnnnnnnnnnnnnnnnnnnnnnnnnnnnnnnnnnnnnnnnnnnnnnnnnnnnnnnnnnnnnnnnnnnnnnnnnnnnnnnnnnnnnnnnnnnnnnnnnnnnnnnnnnnnnnnnnnnnnnnnnnnnnnnnnnnnnnnnnnnnnnnnnnnnnnnnnnnnnnnnnnnnnnnnnnnnnnnnnnnnnnnnnnnnnnnnnnnnnnnnnnnnnnnnnnnnnnnnnnnnnnnnnnnnnnnnnnnnnnnnnnnnnnnnnnnnnnnnnnnnnnnnnnnnnnnnnnnnnnnnnnnnnnnnnnnnnnnnnnnnnnnnnnnnnnnnnnnnnnnnnnnnnnnnnnnnnnnnnnnnnnnnnnnnnnnnnnnnnnnnnnnnnnnnnnnnnnnnnnnnnnnnnnnnnnnnnnnnnnnnnnnnnnnnnnnnnnnnnnnnnnnnnnnnnnnnnnnnnnnnnnnnnnnnnnnnnnnnnnnnnnnnnnnnnnnnnnnnnnnnnnnnnnnnnnnnnnnnnnnnnnnnnnnnnnnnnnnnnnnnnnnnnnnnnnnnnnnnnnnnnnnnnnnnnnnnnnnnnnnnnnnnnnnnnnnnnnnnnnnnnnnnnnnnnnnnnnnnnnnnnnnnnnnnnnnnnnnnnnnnnnnnnnnnnnnnnnnnnnnnnnnnnnnnnnnnnnnnnnnnnnnnnnnnnnnnnnnnnnnnnnnnnnnnnnnnnnnnnnnnnnnnnnnnnnnnnnnnnnnnnnnnnnnnnnnnnnnnnnnnnnnnnnnnnnnnnnnnnnnnnnnnnnnnnnnnnnnnnnnnnnnnnnnnnnnnnnnnnnnnnnnnnnnnnnnnnnnnnnnnnnnnnnnnnnnnnnnnnnnnnnnnnnnnnnnnnnnnnnnnnnnnnnnnnnnnnnnnnnnnnnnnnnnnnnnnnnnnnnnnnnnnnnnnnnnnnnnnnnnnnnnnnnnnnnnnnnnnttcacactcattcacacactaacccgactcattcacacactaacccactcattcacacacacacccatgtcacactaactcacccactcattcacacactaactcacccactcgttgacacacccactcatttacacaccaactcacccactcgttcacacaccctctcattcacacactaacccactcattcacacactaactcatccattcacacactaacccacccattcacacactaacccacccactcacacactaacccattcattcacacactaactcacccactcgttcacacacccactcattcacactcacctgattcattaacacactaactcgcccactcacacactaacttgcccacacgttcacacactaactcacccactcattcacacactaactcattcacactcattcacacactagaccgcgactgcattcacacactaacccactcattcacacacacaccgattcattcacactagctcacccactcattcacacactaactcacccactcgttcacacacccactcatttacacaccaactcacccactcgttcacacaccctctcattcacacactaacctactcattcacacactaacccattcattcacacactcacccactcattcacacactaactcacccactcgttcacaacccattcacacactaacccacccattcatgcactaacccactctttcacacaccaactcacccactcgttcacacacccactcatttacacactaacccactcgttcacacaccctctcattcacacactaactcacccactcattcacacactaactcacccattcacactcgttcacaaacccactcacacactaactccctcattcacacactaacccactcattcacacactaactcacccactcgttcacacaccaaaacactgacccattcacacactaactcgcccactcattcacacaaactcacccactcgttcacacactaactcacccactcattcacactaactcattcacacattgacccacccactcattcatacattcacacactaacccgactcattcacacacttacccactcattcacacacgaactcacccattcattcacacactaacccactcgttcacacacccattcacacagtcgttcagccactcattcacacactaactcacccattcacacactaactcgcccactcgttcacacactaactcacccattcacacactcattcatacactaacccacccagtcattcacacactaacccgactcattcacacactaacccactcattcacacactaactcatccattcacacactaacccacccattcacacactaacccacccactcacacactaacccactcattcacacactaactcacccacttgttcacacacaaactcgcccactcattgacagactaactcgcccactctttcacactaacccactcattcacacactaacccacccactcattcattcatacactaacccactgactcactcacactaacccattgcacacactaacccattcattcacacactaactcacccactcgttcacacacccactcattcacacactagcccactcattcacacacccattcacacactaactcacccactcattcacacactaactcccccactcattcacaaactcgcccactcgttcacacactaactcacccactcattcacacactaacccattcattcacacagtcacccactcattcacacactaactcacccactcgttcacaacccattcacacactaacccacccattcatgcactaacccactctttcacacaccaactcacccactcattcacacacccactcattcacacactaactcacccactcgttcacacacccattcacaaaatccctcattcacacactaacccacccattcacacactaactcagccactcattcacatgcccactcattcacacagtaactcacccactcattcacaaacttgcccactgcttcacacactaactcgcccactcacacactaacttgcccactcgttgcacaaactcacccattcattcatacactaacccacccacttattcacacactaactcattcacacaacccaacttattcacacactaacccactcattcacacactaactcacccattcattcacacactaacccacccactcattcacaaactaacccattcattcacaaactcacccactcgttcacacacccactcattcacacacctactcattcacacactaactcgcccactcattcatacagtaactcgcccactcattcacactaactcgcccactcgttcacacactaacttgcccactcgttcacacactaacttgcccactcgttcacaaactcacccattcacacactcactcatacactaacccacccacttattcacacactcactcattcacacaacccaacttattcacacactaacccactcattcacacactaacccacccattcacaaacccattcattcacaaactcacccactcatttacacacccacacactcacctactcattcacacactaactcgcccactcattcacacactaacttgcccactctttcactaacccactcattcacacactcattcacacactaacccgttcatacactcacccattcattcacacactaacctgcccactcatggacaaactcatttacacacccactcattcacactaacccactcattcacacactacctcacccattcattcacactaacccactcgttcacacacccattcacactcacccactcatttgcacactaactcgcccactcattcacacactaacccactcgttcacacactaactcatccactcattcacacactcattcacccactaactcgcccactcgttcacaaactcacccactcattcacaaacccaactcattcacacacccactcattcacacacgaactcacccattcattcacacacccactcgttcacacacccactcattcacacacttaactcacccacttgttcacacatccactccttcacacactaacccactcattcacatactaactcgcccactcgttcacacactaactcacccattcatgcactcactcacacactaacccacccattcactaactcactcattcacacactaacccacccactcattcacacactaacccactcattcacacactaatctacccattcattc

SEQ ID NO: 1136 - DNA, 3170 bp, Homo sapiens
caccctggctgcaggccccaggtgctggtgatgctgaacctggacgcggagcaggccgtgaagcacccccgcctgctgtccttcacgtcgcagctgaaggccggcaagggcctgaccatcgtgggctcggtgctggaggggacgtacctggacaagcacatggaggctcagcgggccgaggagaacatacggtccctaatgagcacagagaagaccaagggcttctgccagctggtggtctcgtccagcctgcgggatggcatgtcccacctgatccagtcggccggcctgggcggcctgaagcacaacacggtgctcatggcctggcccgcatcctggaagcaggaggacaaccccttctcctggaagaactttgtagacaccgtccgcgacaccaccgccgcgcaccaggctctgctggtggccaagaacgtcgactcgtttccgcaaaaccaggagcgcttcggcgggggccacatcgacgtgtggtggatcgtgcacgacggcggcatgctcatgctgctgcccttcctgctgcgccagcacaaggtgtggaggaagtgccggatgcgtatcttcaccgtggcccaggtggacgacaacagcatccagatgaagaaggacctgcagatgttcttgtatcacttgcgcatcagcgccgaggtggaggtggtggagatggttgaaaacgacatatctgctttcacctacgagaggacactaatgatggagcagaggtcgcagatgctgaagcagatgcagctgtccaagaacgagcaggagcgagaggcccagctgatccacgacaggaacaccgcgtcccacaccgcggcggcagccaggacccaagcgccgcctacgccagacaaggtgcagatgacctggaccagggagaagctgatcgctgagaagtacaggagcagagacaccagcctatctggtttcaaagacctcttcagcatgaagccggaccagtccaacgtcaggcggatgcacacggctgtgaagctcaatggcgtcgtcctcaacaagtcccaggatgcgcagctggtcctgctcaacatgccaggtcctcccaaaaaccggcagggagacgagaactacatggagtttcttgaagtcctgaccgaggggctgaacagagtcctcctggtcaggggtggcggccgggaggtgatcaccatctactcctaatgcccaacagcatcacggcactctgggacaggcacggaggacggcgtgggcagcctgggcctgggcttggcccagggaaacagacggcagacacacctgtcccccagtgatgccacccaagctgcccatggggcttcctacggaagtttctaggcccgtcacctagggctctcctgttcagccttaacaggctcagcaaatcagggcgtggctggacgatttccttgcatctgagggcagacgctgctaccggagtgacctggacgtggccagatcttctcgcaggtcacaagaagccagtgagcccttgccttggtttctggaagttcttttccttggctggatttacccagtggttaggttgcatttctaccccatccagaacattcttggaagagcacccggagctgaagctgtccctgatgatgaaggtgaaacgtcagccctggccatggctccgctcagggccccggtcacctccgagtcactctgttccttgactgtctttgtgtttctgtacctcaaggcactgaagctggaggactctgtccatgcccgtgtcaccctcgtgtgggagcctctgggctcggcaggtccacatttcatgagctgaggcgtgggccagggccatctggaaagggaactcggcttttccagaacgtggtggatcatctgtcgggtgtgtggtgaacacgttcagttcatcagggcctacgctccgggaaggggcccccagctgtggctctgccatgccgggctgtgtttgcagctgtccgagtctccatccacctttagaaaaccagccacttcttttcataagcactgacagggcccagcccacagccacaggtgcgatcagtgcctcacgcaggcaaatgcactgaaacccaggggcacacgcgcgcagagtgaacagtgagttcccccgacagcccacgacagccaggactgccctccccaccccaccccaccccaggagcacggcacacagttcagcctctgagctggctcacacgtgccatccccaccccggtgctccagggaaggaggacacggacccgacgtgggaggtcctcaggcagcagtggcgcctggtgtcaggtctgtctggctgagtcccgggcgtcccctgccatggcctgtgccttgcatggaggcggcggtggcactgaagagatagctttcaagggcccaacactttgcacttcggctggctgtgagtttctgctttgtaggttgtggtcacatttgcaggctgcgggcagtggcaccgacttgggcctccctttctatgtggcatatttatttatttaaacaccccagggagttacgtggtaacaaggttgtccataaagaggttgcttctatatactagaggccccagatggccaggccttgggctacgtctggcttgcatggtctcccaagggaatcagccccatcaacaaagttcaaatcggggcagaggctgcacttgtgcccccagatgtttctgaggagccagactagggctggcattgctgtagagtgacggctgctgcccagagcgtgtcccagacatcacagcggggctcagcagttcccacagcctctgcctgccttggctaagcatgagttaagcagcaaaacgctcctccatgtctggatggggccggcaggtcctgtgtcccctgcacctggaggagagcaggctagaggcacagcggccacatggtgctggctctgaacgttggttggtggctggaaaacagccctgcttctgagggccgctcagttctgcacacgaaaccacctcctgagggctcagctctgcccccgccctgggctgcagcctctgcacgcaagcaccaggcatcctttgtgttgtcaactccgtgtaaccagtaactacagccatttacaattgactccgtttccttttgtaggtttccctgtctgtctgtgttagtagaaaaataaaatcctatgaaatctga

SEQ ID NO: 1137 - protein, 397 aa, Homo sapiens
HPGCRPQVLVMLNLDAEQAVKHPRLLSFTSQLKAGKGLTIVGSVLEGTYLDKHMEAQRAEENIRSLMSTEKTKGFCQLVVSSSLRDGMSHLIQSAGLGGLKHNTVLMAWPASWKQEDNPFSWKNFVDTVRDTTAAHQALLVAKNVDSFPQNQERFGGGHIDVWWIVHDGGMLMLLPFLLRQHKVWRKCRMRIFTVAQVDDNSIQMKKDLQMFLYHLRISAEVEVVEMVENDISAFTYERTLMMEQRSQMLKQMQLSKNEQEREAQLIHDRNTASHTAAAARTQAPPTPDKVQMTWTREKLIAEKYRSRDTSLSGFKDLFSMKPDQSNVRRMHTAVKLNGVVLNKSQDAQLVLLNMPGPPKNRQGDENYMEFLEVLTEGLNRVLLVRGGGREVITIYS

SEQ ID NO: 1138 - DNA, 28397 bp, Mus musculus
  misc_feature (1)...(28397): n = A,T,C or G
tgtagtaattcatctaaccctctgtgttaactttaaatttttttctccatttataaataaaaagcaatggtcagagtcaaatagactgaactgtttctgtgtaatgaacaagatgaattagtctataaaacataaagctgatataaagtcttttcctggctgccaacagtttataaatgtttacaggagcctcgggaagaatatagactcaggatttacttctggtcctaagtgaccttactacaggtgcttggataagctcttcaatctctctggatccccgggtgtcatctctagtacaagagaagggatatgaagcagacattctctacatttctttaagctcttctctgattttacaatgggctaaaacatagccttccttgagagtgaaataccttcagttcttcccgcttaaaaaacaaaacaaaacaaaataaaaatagtgtttttattttgtgatattttattcattctgaggccgttatggtcatgccttaaattagagttatcacaggctttggttccatacagatttctgaaaaatgatttatagcttagttttatgacataaaaaatgcataagaattaatgattgccaaagcccctttaccccagtagatctaacttaagcagctttttggcttctactaatgcaaaacacagctataatatcatgaattacttactgatttctctggaagaaataatgctacgatggttgtgcttagggaaacacttcctgcacaaaatcgcagactttttcttccttccatgtttgacaaagacctgagttatatatgaattcactcagggttttctccacaatgtgaagtaagtgggcaatgttttccctagaaaagatttatttcaatatcagaaaaaatttttatacaatgtgaaatacaactctgttcatggctttgattgccaacacttggatgggtccttctggaagtatctgcagctctaaacacctgtgctttgtactgtccctaccacagcacaccccatgtgatctcatttcaaactgggacagctgttaatcatacacaagcacttgctttaccctagtttgtcattaaatcctttcctggtttgtgagataagtttatattagaatttacttggatggttttaaagagctcactgtgaatcctggacctggaaacacaccatatctgtctttctaggaatatatgctaatggaaggtaatgtttcaaaatataacacttgtgaaattcataagtcatgactcctgacatgttcaaataagaataggtttagtcaaagaatacacatggagggacccatggctccagccgcatatgtagcagaggatagccttgtcaagcatcaatgggagtagaggcccttggtcctgtgaaggctcaatgccccagtgtaggggcataccagggcagggaggtgggagtaggtaggtgggtggaggaacaccttcatagatgcaggggtaggagggatgggataagggtttgggggggcaaaccaggaaaggggataacatttgagatgcaaataaagaaaatatccaataaaaaaaaagaataggttagggctgtttgtttttgttgtttttaatcttcactgggaagagacttaataaagcattacctagatcatgctctcttatagacaactctatagaagattgtcttaattgctaattaatgtagaaagagccactctattgtgctaccagtcctggaacaggaggttcctgaatagtagaagagataagagagcaagaagagagaaagaaaggatacaactatgcaatttatttgctcttgactgtgggtgtgatgtgactaattgaattcttgccctgacctccctgaaaccacagcctatgacctggaatgataagccaaataaaaccttttccccaaagttgctttctatcagagaatctgtcatggcaacagaaaggaaagtaggataaccgatgagacaaaacagctagaaaaatgtctagctgagactgtggaaagacacattagatcactaactccaagtatttgttgactaccctggggcatagggccacaacacaatcaggggccttctcttccattgatgagagataaggccatcctctgctacatttgcagctagagccatgggtccctccatgtgtatgctttagtgtctgtgtttggtgactgtatatggaatggagtcaagtttgatttgtaagaaatatcttaaacagaattcagcaagtcagcaaaattttaaagaattatatttggatttcgtggtaatatttctgacattattaaatactaggtcagtgccagtgggttgactatttaaagttatacttgtatgtgtgtgtgtgtgtgtgtgtgtgtatgtgtgtgtgtgtgtgtgtgtgtgcatgtatgtgtgtttgatgctgtgtatgaaacacaagactttgaacatgctagataaattctctgtcactgagctgtatccaccagaccaaatgctcaaactttttcattaaattaccagttaattaaatacagtcttaaatgtgtaattcttatgattggcctccgttctgatccataagatcaaactgatgtctcagttcttttctatgtcttgggttactaagtgagaatgtaaaagaccatttggtctttaagaagataggaaatatacatctcctcatggaacattggtaatgacttttctcattggacctcatttctttttgtaattctcaatgtcaagtgtcttggaagacactgcagcttataaaaaaaaaatagctggcctgcattatgcagaacaggaatcccatgtctataactataccagatacctcagacttagactattcattggctcactatgctgtccttctttgaaaaaaaaaatcattttagaaaaagcatattctttcaaccctgggttgaaaggctggggataaaatgaatcccaattgtactgaaccagtgtcacaaccatgagcataacattaagggcaacatacagatctttactccttagattatcaatacaaatcatttgaagatgtccataaaagttgttgaagtctcctaaatttcctttaacatttctacagtcatatttgtaagaaagcaaatctgataataaaatctttaataaaatatttatatttttatgttatatgtatgcacatttcgtctgcatgtatgttatgtgcatcatgtacatgcctggagccaatgaagggcagaagaaggaatttggttcccgcagtcctctgcaagagcagggcatgctctttaccgctgaaccattctctaaaccctctgatgatattactccaagtctttaacgacacggccaatgaaacaatacatgtatagtgcttaggtcccaaattcatattttgtcagttctgtagctatcaagaaccccactcctgtcattcagaagaaaaccctcttctagtcacaactctcaaaagctttttccagggaaattaaaggctgccattatttgtatctcttcctgggttggttctacccctctccacatggttttgcctctgtttttgtgccatcaaagctgtccctgcctctgagctgtaatgtacagagcagtgggtggtccttgcactggcggaaaattcacatgctggaaaatcttatgccagggtcccagcctagatctatggagtagaagaacctaccaatctgtgtttaaacatgctgtccaggttgctaaggcggtttgagtttggagaccacaatggtaaattagttaacctgccaccatagtgatccagctgacaggacacagatttactagcctttccctaaaatgccaacaccctgtgagcactaaagcagtttgtcccaataaacaaataaaaatctaagagtccggagtgcaactgactttcctgtattgtttagttatccagcatcaggggtgcaaaccctggttcttctgcttttgcatagctattgcttaattcacttccaaatttcatgacctcaagtgtgaccttgcagttcctttgaaaaacatgtggtaagtagaaacaggaattaagggaaggagaagctaactaaaaaaaacaaaaaacaaaaaaacaacaaaaaaaaccaactccccaaaatttaatatcacatatattattttgagctacactcaacatagtgattacttacacattatttcaaaagaaattaattgttgaattagcctaatacactatctcagacaggtcaaaaacatgttctcattgctactgtatgcaaaataaattttagagtgcttgtaatccaatatgacagatgtgactccaaaataaatgatattttattttgattaaaacccagacaggttcaaactggtagtaaactaacagacagtaacatgcccagctccctttcatagggcaataatctttttgatcttttttttatatcaaatatttatggaatattttggtgacacagaacatccaagattttggtgagagtttttaactctacaggctctgaatgatgttttttttttaattattatcatataatcatcaaagggaaaataacagcactagagactgctccagacaataggccagctgttcagacagtcatggtaatggagagaaggattatgggaactggggtcaactctgtgacaaaggtaactgaggttttttttaaaggaagacagatagggtctgtattagtaccttttctgttgctatgacaaaatacctaaaactgtgtaccatgtaaggaataaaggtttatttgactcatcattccagggggcagagagttcaatatcaaggtacagacatctgtcaaagcctccttgaggcatcattggtgaagaagaacagattagctcaggtctctctgtgtatgtagccatgaatgccaccacagaaacctaccttaatcgtgggtctctatttagccataaatgtcatcatataaatctacctcactttcatgactctatcgaaacctttggtatattactaatagcagttttatttaataaagcttaacactgtagaaagagtaaaggctttgtatccaaatatcaaatcaactatattcaagacagtatatgcccactaatttatataattttgccaaagctttctccagcttgcaaataacacaaagcttaactctgatatattttgttaaattaattgggaatttgagtcatatataagagtacaaagcccacgaggggcctttataacagctttatttgtgttacctattattttcaaataaatttaagggagttggagatacagcttaatggcaacatacaaatattttgttgtcttccactgatcaaaaatgaacattgcttaaattaaagatcctacatgaaaaataaccgtttaacaccatgttcaaaattcctctacttataattatattaactaatagttgagcatatattcaaaatttattaaaaagaccctctagatttacaataacttacttataactgatatcaaatataccttaaaattcattttttctttgaattcattttgaagttatttttaatttcatgtttcttttagtgagatatgaacttatttattcataatttcacaaataggactcctagcaaaaacaaaaattgtagattttagaaatgcccccattttgccatgcacagtcaattgattctcttggcattcttgactatctaccaagtgtatattatgaacaacatgtatctattacggttctttaatgaatatgaattatacaggagataaatcccagtgtgattcttaggggaccaaatgcatagccatgacctgctgcatacttctctgtgtgcctacttaagctctgatgtacacaactgaaaagtgagggtgaccaaggtgttcttccatgttagcatagagtagatcagtttgaggctctacaattacaattacaatgggaaagagggagagatttaactttaaaagatttaaattgtaatgccattaaactaaacatgacatatttcaaaatattgattaaaactagcaaagtatctaagtattttaaatgtccttgggcttggtaatagatatctttaccactgagccatttgtccgagtctccaaagcttttactagaaataattgtagcatcatataggttgcaaaaatggagagaggtcccatatacccttcactcactcttaagcaggagactctttcaaatggcattgcattttatgtagacacatacaaatataatagtagctgatctaacgaagctcaaaaatttctggagttcctttccaagaatgatccatatatatctatatctatctatagctacatctacatctatcaatctatcaatctatcaatctatctatctatctatctatctatctatctatctatctatctatctatctatctatctatctatctgagacacctgcagacttggttcctcccaaagaggtgtccacatacacaggtgcttgcaataaatgcagccactgtctgggtcctatgaagctttgaaattatgaattggtgacctgtggtacaacccagacttactttcagaattcaaaagggcattaaatcacctaagtctttccttttgttctattttgaaagaatagcaaacttcctttgaaggcaaaggtaaacttattctgatataatcattaagcaatacacatacattcttgagcatcatatgatggcccttaaatatgtacattttaatgtctcaattttaaaatgctttaaagtaaatatttatatgcttgcccaaactagatataaagttaaaagggggggggtgtcagtcctttaaacactgagttcccatttgaggtaaaacacagagttccaagtgtattttagcagattctctgacacgttgtgtgccagagtctccaaagagccagccatggatttggtgatattcataccatgttgtttcctttattcagcttggtctcattttttttgttttttgttttgttttgttttttgagacagggtttctctgtgtagccctggctgtcctggaattcactctgtagaccaggctggcctcgaactcagaaattcacctgcctctgcctcccaagtgctagaattaaaggcatgcgccaccatgcccggctttgcactcccttctttagaggcacagaggcttaaatttttttttttttttttgttttttttttttggtttttttttttttgaggcttaaattttttacatcacatcggaatgccacgtgctgtctagttagtatcttctccttgtcataagtttattaaagtttaccccccctctgaaactctgaaattttcccaagtggcaccccaatatcattgggagaatagcatgttgtcatttaataatgagttatattgctaaatggtttctttagaaaccaattgtaggaaggagaaagagaaggaaaatgaaaataaccagatgtgaagagagaagccacaggactgaacttgtcttgaccttgtatgtgagctatataaattatctttatcatttattttctaatctataactgatgacaagaatggcaatacctccttgatgaacagttatagatattacagtcattcaccacaagagagcactttttaaattattcaaatgaatatgtgtatgagtaccctgagggcaacaaccagcatagggtaatgtaaaagtaaattttattcacctgatgtaattgttgtctgggaggcttattgccttcatctgctaggcctagaatgtttgcagcctctgagatttgttgctgaataagctcacccttccttgttctttctaagctctacttggctggttcaactcagatgttccggatcaaagtcctctctcccagatgacttattcaatttggcttttttgcgttgctctgcttggcatcaaactaactctagcaatcttttataatattctagctccttctcattctcttgctcattctgtctttccctgtgtctagcttgttctctcttcaatcagtctctataaaactctcccagtaaaactgcctcctctctctctgagctgctctaactcccactctactgcactggtctccacgagctctactgtatcctatactgcactctcttcctcctgtactgcctgctctaccttaagtcacttccctttgctctctcttctcttgagagttgagcatattctgtcccatcaaactgttctttgatccatcacttgttcatccactcaatttgacatcactttcaaacatgggtggttccttctacaaactctctttaccttcatcgtttgggattaaaggtaaatactaagggcttgtctgtattccagtattccaggcagagggattaaaggtgtgtgctaagggctgagccacactctaactagaaataggttcaaatatcctgtaacaggtaataaatattaatgatgtaaacattgtcccaaagtgcaccttagaatctggccttgcaaatgcagtgggatgtcacattaatgaagattgtgttgtatgaggctagacatttcctctacacatggatagaggttttcctgcacaagtctcctttaatgtcaacttacttgttctctcatttcttctagcttttagtagtctaacctggaaaagaaaaggagagaaaacattcaagttctgagtataagccatttgttccgttgtggggaaaaaaatctgaggatacattttatatgctacatttaagatggtgtgtgttatgttaggtgatacacattatgtgggaacttacgatttccttccaccacattatctggctaagccaatgaaagttttatctgatgtatggagaagtttcataactttgggaagaagttccaagtttcagaactattaggagaaaacttgcctctaataataacagaagctctgagatctaggcaaattataatcattgttttatggaccatcttcactgcaagattctgtgaggaaatattatgttggccacttttcaaatgatgctgagatgtggggcagtctcttgacttctgtgggcacttcccaatagatgcagagccatgagtcaaatgcatataccccatttccaatgttacactctcttcactgtcctgctcatccagcctgagcaagctctcttgcaagtaatgaagtcagttttattctgagatcttcttaggcaaaacaggtgggcttttgcattctggatcaaatgacttttcccacatatgcctataaacttttcaaagaatatcatcgttgcatacaccaaactctgccttttactggaggaagtggtcttgtttgctaattactacttctgtccattttcccttccttctagaaaaagcgataatcccttaacctggagtattgtatctgcttttgtaagatggtgtggatgctgagacacgtctctctgtacctcagaatgtcaacacgttggccaaagaaatgaatttatcagttaaaatgcagccaagggatttagtttatctagatgtgctccaaaggaaaaatagtttaccattgtttttacagattgaggtaaatctgacagatctttgacatatgctacggatttaatttaataccacagtacagatgtaggctctgataagtttttttttttttttaaatctaggctaagatgagtagagtagtttcaatatttatggggttgaaattgcagagattgcaaaggaagcattttaattaaaacagcattctcctgtatatgctcagattctgtacaaatggagggacaacctctcaaagcctcactcctggtttgctatactccctggggttttcaacacgttcaacagttttggctcagtttggctatcccattgtttgtcttttgccttgaggataatagaaaatgaactttatcatttgttttgatttttaccttctcccagctaaacatgatgaccctttacagctcatctttgtgattgtgtgttttaggtgtcctggagataacatcagtggaaatcggagttgttgccgtcaaagccatcaacagcaactattacttagccatgaacaagaaggggaaactctatggctcagtaagtagcctgattttgttttcaaagcacattgtattgttagtaccaaagatttggatggtttcctagagaagacactgaatggctttgctgtcatttgatcgctactaataggattcgcagcatctcaagggctggcaaacagcttgttcaactctataatctcccgaactgtttgccaatgagtctactaaacaggccattactaacatttgtgaatgttcagaactgcaagccaatcaggctttcacggaagcatctggatgaaatagtgtagagactagagatgacaacttggagaagaatcacttaaaacaaaaacattgggtggaatggaagatcatgcactatgagtatctgccatagctgaaaagtaaaaccacagctcagatgctgtgtactttgttaaaatcataaataatgaaacatacctaggaatttcacatacctaggtaatagtgttaaattttaattatgcatgaacattatagacattatgtaaaaacaaaatactgtcctcacaatagggtctacttctaccaaaaaaaaaaaactacatgtaataataaaggatactcttttagtaaggtcctcatgtgccttgggtagactgattagtgttaagtactttgaatatgttaatatttgaatttgaatattagtgttaagtactcttcaatttcaagttcagttcatttagaaaaagtctttttgactgaaacctcacataaaataataagtatttagaattaaaatcacagtcataattaaaacagtatcattcatggtatatgatttaaacttttagaagaaatgtcttaattaaacatgtgggtagctactgtgtgccagatactggttatcctgcctcccaaggatatataaggaagaagtttagaataacacatggtgatgtacaactctggtcacagcacttggaaggctgaggcaggaagatcacatattctgtactagtgtagatacatagaagaacttatttccagacaaagcaaaacaactccttcattcatgtgaatgcacacatatacacacatacagagggagagattgagagagaggagcaatctttgacttcaagcattttatactatataggggaaactgtcaacaaatacaaaatagttatagaacaactagcttgtattgtaagaaaagactgttagtagtacagtagccttgtgatgacggcagaactctgcttcaatctcttaattgccattttaagtataatacaagcaggacaattaatgactatggatatgtcttgcagttttgatcccagcactatactaaaaatcactaaatgaatttaaatttttctaaattccactatagaggaatatatggaatatagatacataaacttttaattatatttttggagaatatatagtaacatttgacacaggtatttaataagcacatcattttctagcgagatattttatattttcacatttttcatagatatcaaaaattaactttcaatatgtaaatttactttcttaattagtataagggtggtcagtagttcttaaacgtgagtaagcttcaaaatcagtgcgaggctttgttaaacagcataatgatggaacacagtcccacactgtctgattcaagtttaaggactaaggatttatacattcaatgaggtgcccactgctgtctgtgttattggttttgagttgagaaccatacgtcttgaaatgatctagctttgttttttattcatatcagctctgctgttaaatgacaagccagtcataccaggacaaatcctggtatgagggccacaggaattttaattcaatttcttcattgcatattattcccccaagaagcctaaaaaggcagtaaaacatttttaaaaacagctctatttagggctttaaattcttaccacttttgaaaaaatagtgtttttgcttttgtttttattaagcatgtttagggccttgccagatggcccagcctgtaaatcttcgttctcccaaatctaacaacctgggttcaatctccagaactcatatggtaggacaatgatgactcccacagtggtcttcctgcttacacacactcatttatttgcccccaccatacacactcatgcaggcacgcacacacacaaacacacagatgcatacatactaccaccagcaccaccaccaccaccaccaacaacaacaacaaaataaacaaatctgcttataatttttatttcaaagtgtcataggcatggagagatgatggctcagtgtttaaaaacacttgctgctcttgcagaggacccaaattcagttatcagtaaccacatgatggctcacaccataggttattcctgttccaagccataaaatactctattaacatccttaggtaccagacatgcaggtagtaatcagaaaaatacacaggctgaacatccatacatgtaaaataaatcacttttaaagtaaacaaaacaaaacaaacaaaaacaaaatatgtctgaatccagacagtggcctgcacattaattttcagcgacctaaggctaaggtaagaggacaactttgaatctacaaagcaagaggtcttggtcttttaaaaatatcaactaaacaaaaagtcccttcttgttccactatatcagagtcaggatgtaagagtgtattcgtatactctttgaagaggtacttaaatgtacacattagccaaagctaacataatacagaatcatctaatataagttagcttaagaaaataaagtatacaatttaagttgtgagaaaagattaagccaattttaatcataaaacatgcttcttttacaatgtggtatcaagagagtaataacccactctcaaatgaactatgacattaaaaaatgacattttcttatcagttacccattcccttctatgctgacatacctcctgtgctttgtggttgcctcatgttgagctatattctctataagtctcttcattcaacctgttcgtttgaacttgttccccaggtactctatcctattaccatattacctagatattacctagataggctcactgtctgaaatgactattatctggtgtttctatcatcggtgtgtttgctgccaacctcctactaccaggttgtaaccctgaagaaggctgaattagccacctctctcactatgtacacaacatctgcacacaacatctagatccactcggtttccagagcacaacaatgcaaaaacttatctacctcccagtagctccattagaaaacatgttctctgcttctagcccatataagaactaaatatctaaagactatactgctaaaaatcaatactgcatactagtatgcatctacacgccaggagataacactgatttttgtattattatttccaaaatgatttctattgattacagaagcctgcctggaagaatctctgagcaaacacacgagtgattggtgaaactttctctgtattattctccttgaatattttcttctgttcatttatggggaatgtctatctttctttcattttcagagcaatactatcctatgttccaaggtttctgttgaatgatagacctgagcaagtcttgaggatgaattagtctggtcttcaagcatcatgattgaagaatcaaatcaatgcctcagatgagcacagaaaatccaaaacctttccttaatccaccctaattcaatttgggatcttgttttacctaattctttgaaaggatttttattctttaagaattactcacaatgcagtgtgatctttttcaccaactcctggccctgtcgccatcaagatacacttccacctccttactatctcaattcaatttggtgctacctactttttaaataactcatgggttcaattttatgctgtttaaacattcctaggtgtagactcacctactagtgtggtagacataccagcatccacacccttaatagtaaactcgctcccctctctggaagccatcagctgtccacagtatcttggttagggatgaagcccattaatgacttcctagtccatgatacagttgactgccttgatctgatgtagttttgttatcacaggtgtggtgcatccttgattgcagtagtcctgccatgtccagcagtcagttttctcttattccctctgacctctgacctttacagtctttctcccaactcttacatgatactatgatactcccagatccttatgaaggtgggagtaagatacagcagactaatgagtccatgacatttactctccactgacatgttgtcaactaccatccaatacaatacacaatgaaacgtctctggtgagatctaaatggtgtgctaatccaccagcagagagacagagatttacaggaaagtttgatgttttgttcatttcacaaattaatagcaataggtacagtcttgggtcccatgcgctccccaattatgaatccttaaccagatttatagtatcaagtatatgtttcctcctgcgaaataggccttaagtttaatcagaaagtggtggttatcctcataatatttgtaccactattgaatttgtgggcaactcttgacacatcagtcattatggtaatttacagagttcacagacaggtaagaccttccctcagtatcctgtatagcaccttccaatattatgaaagcaagcagtagagagaaatgtccttcattagtacaacctagatttcctaatcattaggacttaggcttatgcttatctcatgaacatctaggccttcctccagaaattatagctatggcacatttcagttacatcccaagtgtcaagacacctgaggtgagaaagctgaatcaggcacacttcattttttaaaatattactctttaaattcattttagagaggggaaaagcatcaattatggaatctccaatatgaaattatttgaaataatccaaatctttattttaaaaagtttatacacttgtttggtctctgtctctgtctctgtctctgtctctctctgtcggtgtgtctgtgtgtgtgtgtgtgtgaacatgagaaggcaggtacatactgcaatatgcacatgtagaggccagaagacaacctgaaagagttgtttctctttatccatcttgtatttcttcgaaatggaaattaaaccattagtctttgaagcaagtgtcttaactaattaactgtcttactggcctcttcttttactctttaagctatatagcactttagtaagtgtaaaacacaactctattgcttgaaagccatatatttcagacaaatgaataagaagtaaaattaaatatgttcataaaaagatttaatattttcaatacagatttttttattttattaaaagacttatcgtagataatttatttttcttctttatatcagtcttatcattgaatggattttgtatttaatagtactttatagatgagaagcacacactactataaaactcccagaatggaaaaataaactgataatgtcagtataagcatgtgatgtttcattatgttcccagcaattatctatagggcagaaacctgaatttaactttgtggcctggatcaatggctcagtgattaagaatagttactgttctttccgaggaccgggattcagttgccagcacccatgtagtggttcacaatagtctgtaactcaagtttcagggggattagataccctcttctgacctaagcatgctcctgctagaatgtaatacactcaaactaataaagcctcatgcacatatacataaatcttaaaaataaataaataatttaaggatagaaaatataaagattcctgggatgaaagaaattgcccagttgaggcttctatcttcagtgtgtcatggggcccttttggtagacgaagagagtagaaactcagagctctggagttttagtttctgaactagtctagttttcttcaagagcagaggggcatttcttcaggttttgtgtctataattaactgcagaaaaagatactaaattctgaattcaagaagcagatgacagaacattcttgactcatcaaaaactctctaagaccattggccacttgaagcagtgccagaattttgcaggtataggtggatatcccagtgagaaggttcataattattttgacagggtgattgacaaaacaaagcatttttttgaaaaaaaaattgaaacaaggcctcatgtggcaagggctaacctagaactaattattgtagctttccttgtgatccactcacctctacatttcaatctctagtagtcatagtagtcagggttctctagagtcactgagtttatggaatgtttctccatagggaactttattgtaatggcttagattgtgcactccaactaacccaataatgggcagccatgaatgggaagtctaaggatccaggaattgttcagtcccatgagcctagacgtttcaggaggtcttctatataaactggtatcctgaagaaatagattctaatagatgtgttagcaagtaagggcaagtagataaagaagagtgaggcttcctcctttcaatgtccttatgtaggtctctagcagaaagtgtggcccagattaaaggtgtgtaccactacgtctgtatttggaacttgctttgtcacaggctggccttgaactcagagatctgcttgccttagtctcctgggattaaaggtgtgttctacccagcctgggactaagcttttcatggccactatgactcaagatctccacatcaagatctagctcagaagcctgtgtctttccagcctcaaaatctggatcacaggtgtgctttccatttctggattgtagttcattctagatgtagtacaaccaggaatagccaccccacaaacatttgtattataatcatatggcaccatgttcagctagaacccagggccttcttctttctatgtatgaacactatcaagtgagtgacatctctagtacccaaaacattttctgtatcttagctttaaatcatcccttgaattgatttttaagtagataaggtttgtaaatgtgataagcccatatttctggtaattccatttttcttacaggatctatagttaataccatgaaaaataagattattaacactctcctctatagctagatcatcataaatactggtattgtaatgtctacttcctgataatcattctaggcacataaaccatgttatattcaaagcatttcaactttttaatgggccagaagacatggcactgctgcagtgattcatcaaagatgactcgtgtgttttcaaacacagaatctgttgtgtgcttaggatttttgactcttctgttgttagcgttgtatatgaagtgagtactttatgtaagaaaaaaatggaagctacaaacaagacaatggagtgtagatcattacatggcttgtatcacatggaatcaagtattatcaccatctgaataaataactgtgtttcccttgcagaaagagtttaacaacgactgtaagctgaaagagagaatagaggaaaatggatacaacacctatgcatcttttaactggcagcacaatggcaggcaaatgtatgtggcattgaatggaaaaggagctcccaggagaggacaaaaaacaagaaggaaaaacacctctgctcacttcctccccatgacgatccaaacatagaagaaaacactgttggtggatgcagtacaaccaatgactctttggacagaaagagatggtatcctcactgaagactgtagctcaaaaggcaaagacatagccctgaattcagcttgtttaaaggaaggaaggctttggatgtttttgtactcactgctgacatacaaagttcttttcactagctctgtgtcattgtgtcatgccttataatcaagatagaggcaagtcaagtttggatggaagttatcctcaagtgaacaatgttgtggtgggggctgggctttttttgtttgtttgtttgtttcatttttaagtttttgtttttgaacttctgagatagaacttaaagaacatggaacactctgttgaatgatctttgggaaagttatttatggaatatgaacacatatcaaagactttcattgctcattcaagcctgatgattcaatgagcagtaagacacgcaagcatttactggaaagcacttgggtcatatcatatgcacaaccaaaggagctttgggtgtggcaccatggaagaattggatcagatttacaaatataaacatagtagtatgaaactgtcctaatacaaatagtatggtatgcttgtgcattctgtctccatccttttctatttccttctaagttatttatttaataggatgttaaatatcttttggggtttaaagagtatcttcaatgctgccctctggtttaccttttctctctctctctctctctctctctctctctctctctctctctctctctctctctctctctctctctctccctctctctccctccctcccccctctggcaccatacgcacattcatgacaaagtgttttaaaaccttggcaaacacttcagaaataggagatgagatcaaggaagcagtatgaatgccccatgcgctctcagttgacttaatttgcacttctgcaataaaaaacaccagcaatgactatggcagaattctgctatagattatgtaacagatatctgtcatcatttgtcaacatatatcagtccagagggacccttaccttaaaatgtagaaggccaaattctctttcattgtcttatttcatcttcaagaatatactaaaagaagaaaaaatgaattgttagactaacattgttgggttttttttttcctactgatgatggcttgccacaggtcacaatggcaaatgatgcaaaggttatctgcacatacatgagccctttgtaaggcccacagaatccttctccctcaaaagaaccaaaaaaggaaatttggtatgaagtgcaactctccctggggcttaacctgagcaaatatatcctagtatatgagtaaccatatactgacacctgttcaagctgaatggtctagtctttacagaaccacataaaccttgttttctgtaaatttaaaatgttctagaaggttccataatataaccacattgaaattcattttcttagaaaaggtatagaaagcagtatgtaagtgtgccatgcaccctcgctctgtagatcactaaataaacacgtaagccttatttgcagtgtctgtagtgattttaagaatgtaggaaacacttctaaaaaaattttaaaggataactctgagatgatattgatgctgcagtcttctttcttgtttggaaatgtctgtttattttcattgtttggattcagtattttgataggaacaaaaagactcaccaaatgtgtctgtttactaaaatttaacctctagagaggctagtgatttgtgatcctcttctaacttatttgtgctgatgcttgaccagtacaaatcagctttttaaaatattattattaaaggttgatcagtcattttaaaattggccttttttttcagaatgttcctacaggtcataatttatgatttctttgaaaagcttgcatttcaagagaaaagcacagaggcacaatgctttggtttatgggtataggttgcattttgtggtgttctttcaacttgttttctgacaaatgggatttttaaaatgtatacttcttgtggttggattctgtatgttagagtttaattggtaactgagtctaaaggctctaatgtaatgaatctctagaagaactaggtatctttttttacttttattttaaaataataattatacctgacacatgaccatggaccacccacaaccaaaattaaatgtttggggagacaaactatagtattcagtgacaagggtaacagcaaatagtgcagacgttggattcttatttcactttgccatttagattactaaagagactatgtgtaaacagtcatcattatagtactcaagacattaaacagcttctagcaaaatgtatcaaagcttgcagagtccaaaaatagaaaacatctttccccctctcccaccctacatttccccctgtatgcatcctaacagagataaatacaaaatgaattcggtaaggagagaggagattcttcttcacttcatatttgtttgatattaatagagaattctggtcctttttacaactactgaaagaaaagaagttcagtcctaaattttgtgtgttaaaaaaagaaaagattttgtgagttctgcctccgtgggaagtgtgggcactgctccaccatgctgaagtgtgttagccacgggtacagagcatatgactgttgacatcagactccttaaagatacagaatcgcttccctcctcctaatcctcaaaaggctgaacagtgtatattatgttacatttaaataaaggcaataaaaatgctgggaaaagagaataaaagtactgttcttattttatttcctttctttcttctcttctcttttcttttctttccttttcttttttttttcctttttttttcttttttttttttattagcctaaaactatacctggtaatgagatcagctccagggctgtgtgcatggcaggatgtggttaaatgccccacagccccaaacaacaacaacagaaaaaaaaattactcaaacatttgtaaggtttctttaatgttttacatgtgtgagccggctatccttaccctaataacaaccaaatgctttcgggttctcctaactactcaggtccacctagtttacacagtggataaagaagaatgaattgaaaacaaggatggcttgtgcaacaatgagaggctcttggaggaaagccaggagctgcaaacgttgacttccagggcatggaaaagaccaacgaatttgatttgaaaagtaggcaggaaagaaaagaaaaaaaaaaaaaaactgtagtaatgcaagttgattccagggctcaagcaagtttgtggacagagtggagggatcagtgttctatggctcaattctaataactagagcattgttaattcttggattgattattcaataaagtaaacgtaacatttttatatcaatgagtagctagccctaagttagtttatatatgtatgcacgtatacatccatatatacatatatatgtatacctgcatacatacatatatacaaatgtatatacatgcatacatacatacatgcatggagttaaaaatatttaagagatgatgaactgtactttaaaatagcacatatgagttcaaacaaatgtggagacaagagctttgcctacctttgctatttaaactaagctagaaaaacaatttatcttgaaagaatcctgaggctctctgaattcttccagaattggaaaatagagcaggaagcatcttgtcgctctccctcgtttcctgtaagctcacactgactagatggttacgggttgctcacttccaagttgtttctttccaactacaaaactctgaacttccttttctcaagaagaaaaatcgaaacactgttaagtatgactcctagtgctcggttttgactaatttaccaatcagcatcaggagcaatctgctagcaagggatctaggcatcgtgaagggccagtcttcattcatgtgagcacaaagaggcaagggacagtttctgcaagttcacacacaagagtgaagaatcagccacttaaaggaggaagaaaagaggaagaaaggaaataataaaaagtaaatgataaaaataataataaaataaaaggcaggtataaaaactgaataattgctagttacatgtgcttaaaataaactatttatcttattcctatatattttaatcaactccaattatctgtcatttattttttccaaatgaaaaagatagaaagatttttaaatgaaaataatatttgctttgttttaagccaagaatggaaccctggatatagccaagctctccgtagctttgcacactttgtagaaagatcagttgaatgaattacaagttttcaatgaaaaaaggctggcccttctagtaaataacaactagcatcataaagatgctataaatacttctttaaacgtcttccataaacatgtgctaatgttcttgagtaatcaacatacaaaagattgaaaaacaggtatcatttgttgttttaattgtagaataaaaatggaaaataaattgtgttacatcttttaacgtatcttgtagagttttaacagaagacaaaagaaaactttacaacctgcattcctcttttctcttgtatattaggggacacatcagaaaattcccttctaagtaaacaatctattgaaacatatttataaataccatgcattagttaaaatggaatgatcatgaccaaactagcaggatcaaagcagctggtcttatttctaagtggatataacagacatttctatgagtctccatcgtgatagcagagaaaggcaacagtctccaaactctgagagaagccatatgccaaccatacatgcatgtgacatgtattattttacacatctttattaccctccacaaaagagcctatattcttttttttttttcatgcaggcaattgcatcctccagagatgagcacagcaaatgaagaatcaaaacatcccatgttcctcattacaactgtaaattgaacatatgccataatacaacgtaggcagtgaccccagttgcagagcaaccaactgcagtgtggccttagccctcctaaagtttggttttaattaccttatacacatcttaaatgcctaaatcatcttacaattttctaaattatttagttatcatttctgtggtcaatttaagctgctgacaatgcaaatacactcaaagaggtctttcaaggagaagtaaattagaaccagttttccatgaggtattatagatttagaaaggactgtgttttatggttatgggaagcactagggttaggggtcaattattaattcaactcaacattaaaatattttaacatatggtatttaaaccagaatccttaacagacattttttttctgtgacataaattaatatgttcaggtataaatggtatttaagccaatatttatataatttctatgagaagcatatttgttatcaaggagttttccagtgggaagcactgaaggaggatggcattaaatgctagtaaagatgctaccttagggacatttcctgataaattgagttctgaaatcaaaatgcattttacatatcaagtttatacttacatagaaatcaaatgaaattaaattgtagccttagctgatatctgtagtcattcctcccagtcacatgggcgagccctatattccaccccttacatccctagaaaataggcaagccagcccatttctacagggacagtgcatttacctgtctacttctcctctgctttaattcaagaggatattaaatagcttcctgccatgcatttcctcacaagaaaatgatggcttttattggaaccaataatctactccacttctttccaatgactagtaactctagaaggctgtaaatagagattgttggtggcaagtagcaagatgattgttctatttttttcttattgttaaattatttaccttattagagtagtggttttcaatcatttacataattcagtttgaactcggtactaatgagaaaacaaaacaaaatttaagcataggaactactactggttgaatttttaatagcagtcagtccctagaatatgttcctatttagaagcaaggtcatttcagggacattgaataaaagcaatttatacatagacataaaacaaaaccaccctagtctcttcgggcttctctaataaaacaccacatcctgagtggattctgtagacaaatgaattggatatatgttctaataatcattttgcatacaaatattgcattcaaaaagacatgactataaataattgagttctctaatacaatttatgtactctagtgagtattgaccatttcaaaaatatatcagaagattgtgtttacattaatagacttcatcatagaaattagatgctgttgagtgactgcttgaggagatgtatctatttatcccaggaagggaactaatgacaaaccaaagaaaccattctacccaagtctatcttgatgaaccactgaggttgttttgcaattttctataaaagatctgatgcctcagaggctgcagtgtcactgaaaaaccccagagcatgctgtctaagctgaagacagttccactagacagtctcccgtatcttagcaaccactcattgattgcttatataatcttagggtctggccttgtgaatcctgtaaatttcaggtgcttcctgaactttgtacatatcaattccctgaatcccatgaacctcactactttccctgaaaggaagtgtttcagtttaaaggaagcagctatacaacacatgtcttcaaaatttctctcctcaaaagtaacttcacatcttattcacagctatttgaactacagataggcactttggctttaaataattcatcttaatattcttgcttttttagacgtacatatatttaaacatacagatatgttcaaatatatatacatattatatatgttatatatatcatacatatatatttagacatgcagtatatttgaacatattcatcccatcccaaattcctcccatgaaaaacacacttttatatcctttaattcaatcccatcaaacgttgagatttctccttttattgccttttccccattgagcccattttgaatttcccagctagtcttgagagtggagcctaccatgatatttggccagcctaccaggatcgttcacacacacacacacacacacacacacacacacacacacacacacacacacacacacaaaacccaaaactctctctttctccccccccccttttcccctccccagaagacatcaaatgacaacagtttctcagctagtagtggaattttgagaccaccctattccctctatgttgaaattttgtctgactagatcttccacaggtcatatgcatgttatcacaatcaatatgagttcttatgtacaaataccctgctggttctagaaaacatcatttccttggtattatcaatccctttgtctcttacagtctttcttccttcttccttccttccttcctgagccctgtgggaagtagtatgacatggatgtcctatttaggactgataacgctgcagtttgtaattctatgcacattaaccagttggaagtctctgagttagttgccatcttctgcaagaagtttctctggtgaacattgaaagagtatctatggatatagccataagtcattagaagttttttttttattaataaattctatgaccattatcaaaatgatagtattgagccataacttagggcctataacctatctaatcacaagtttttgcctcttttaacagtgccaggcatgggttctatctcacgaagtgggccttagatacagtcagaaagtgtttggttactcctataatatttgtgccacaattgcatcatgtctgttaaggctagtttttgcagggtttacaggaaagtgggaccgagattaacctttctcctccagcagtgtacatagcatcatccagcaccatgtgtgctaggtgataggaatagctatcaggttgagttccagcttggtttctctatgttttatgattcaaggacgtgacatatttagcaatagtgttctgccatctacttcctaaggataagcatgaatatggaaaatagcctataattcctcacctctggtgacctcactggccaacatatcagaaagatactgtaaaagaatgaagcagaaaaaaaatataaatataaattttgagccaccctaatttttttcctttatgttactgaaaatttaagtgtgaacaccacaccatagttttttttttttttaattaaaatttggtattttacattttttttttttagttcatcattctctttgatgaacaataaattctgaaaacctatttggtgttacagggcataaaaattaagtataatacattgactaataacctcagagccagtctaagtatttttaagtactcttttctccaaagttgattagtagtagtagtagttgatttttctgttattcaaggaatgggttttcagcctttatacttttaaaatgtcatgctggattgcctgtgcattatagtgtttgaatcataacaatatcccaccaattgtgatagccaaaaatgcttataataaacaagagttaaatttgtttttgtcccctgaactcagcattaggtaatgaagtaagtctcatgactctacaacattgttctccttcttgtatacatattctacacaggaaaagcaagtccagtgtcttttataaccctgcttttcaatcttcagaaatgcaattttaaagacaaccaaggtatttcattttaatgatgtacctcttggttgacattgttttacagggaatgttatgtacttgtaaattagagaaacaaatattttaattcttgctattcttagccatacatttgggaaaggcactctacataaggtaaacatgagtaaccgtaaaagtggcaatagtcactaatgctgggttcagtcctaggagtaaataatatatttgttaagagttttgtatgatgctgcccaatagtgcatattcaattcatgtgtagttttctacagctttggttcttaagtcaaagttcctggtgatgataataccaccttatctgaaggaagaatatttatggaaattttcctgatgtggtaaaattatgatgaatcctgttctgaattttcctttaagagagggcatacagaacacatgtgaagggttctacaaaaatacccattgttttcttgccagaatgctcatttgtctaaaactactgaagaccccttgcaagctcacactggtagccacatccagtgaaggctttctgttaagtacacaaaactgggaataacctgacaaggttattacctatgatcagctgaaacagtgactgacacttgacatcatgtcaactttccttacttctcaacattgcttcctttccctggtcacacacatccttatgggcactccccacaaagctcctacatgtgtctctttattacaattggtttcctgtaggaacagcccgaagacattgtttgagacaagtttgtttatttttaaggtaggaaatgagcctatttcatgctgttacaggaacatagctaaagctaggtaatttataaagaaaagaaaataatctgtgctgtccaggagagtaggaaagtcaaggtcaagagcatgaactaggtgagagccttcttattttgccattcctgatggaaggcagaagggagaatatcagctagagttttaattcacaatatcaagacagatttaactataatttgatttaagtttttcttgaaggcagacccttcctgacataaacatcttccattcagcctaacattatggcacagttacaatgggtattacatttctgacacatgaattttggatggacaatttcaaactgtaccaaggactattagagaaaacagtatcaaagaactagttaccctctcatgtgaatgccagtcttcctcattttctttttctttttttttaaaaagattgatttattcattatatgtaagtacactgtagctgtcttcagacactagacttacatagcctatgagtttaataaatgtactggagatactcaacatgttcttggagccaatcattaatgggaacagataatcttgatggttaaattggaaataggtagcaacataaggacaaagagttaagtgatttgctcagtgaactagagaagacacatggttaagaacccatggatgttctaatattagggaaannnnnnnnnnnnnnnnnnnnnnnnnnnnnnnnnnnnnnnnnnnnnnnnnnnnnnnnnnnnnnnnnnnnnnnnnnnnnnnnnnnnnnnnnnnnnnnnnnnnnnnnnnnnnnnnnnnnnnnnnnnnnnnnnnnnnnnnnnnnnnnnnnnnnnnnnnnnnnnnnnnnnnnnnnnnnnnnnnnnnnnnnnnnnnnnnnnnnnnnnnnnnnnnnnnnnnnnnnnnnnnnnnnnnnnnnnnnnnnnnnnnnnnnnnnnnnnnnnnnnnnnnnnnnnn

SEQ ID NO: 1139 - DNA, 888 bp, Mus musculus
aggtgtcctggagataacatcagtggaaatcggagttgttgccgtcaaagccatcaacagcaactattacttagccatgaacaagaaggggaaactctatggctcaaaagagtttaacaacgactgtaagctgaaagagagaatagaggaaaatggatacaacacctatgcatcttttaactggcagcacaatggcaggcaaatgtatgtggcattgaatggaaaaggagctcccaggagaggacaaaaaacaagaaggaaaaacacctctgctcacttcctccccatgacgatccaaacatagaagaaaacactgttggtggatgcagtacaaccaatgactctttggacagaaagagatggtatcctcactgaagactgtagctcaaaaggcaaagacatagccctgaattcagcttgtttaaaggaaggaaggctttggatgtttttgtactcactgctgacatacaaagttcttttcactagctctgtgtcattgtgtcatgccttataatcaagatagaggcaagtcaagtttggatggaagttatcctcaagtgaacaatgttgtggtgggggctgggctttttttgtttgtttgtttgtttcatttttaagtttttgtttttgaacttctgagatagaacttaaagaacatggaacactctgttgaatgatctttgggaaagttatttatggaatatgaacacatatcaaagactttcattgctcattcaagcctgatgattcaatgagcagtaagacacgcaagcatttactggaaagcacttgggtcatatcatatgcacaaccaaaggagctttgggtgtggcaccatggaagaattggatcagatttacaaatataaacatagtagtatgaaactgt

SEQ ID NO: 1140 - protein, 100 aa, Mus musculus
GVLEITSVEIGVVAVKAINSNYYLAMNKKGKLYGSKEFNNDCKLKERIEENGYNTYASFNWQHNGRQMYVALNGKGAPRRGQKTRRKNTSAHFLPMTIQT

SEQ ID NO: 1141 - DNA, 103689 bp, Homo sapiens
aataccaaaacagaggtgagaatggcagcagagtttgttagctaaattctaactcttaagtaatgagtaaatagggattttttttcctcatagccccccttgaggtcattttaagaatcttcactaaagtaagcttcaaatgctctcagggaacatcctcagctagcttgcaaagttttttttctccactaattatgtagaatggatgtgcactatccagccttagatttctaggcaaaataatcaatttctttttcatcttggtggaaaagtagcccagaagttaggtatctgcccccaaaggaaagaagaagggttaacttgacacagagcagggtcccaagtcaaggacaagggctctctttactgctactgttgtagtatcaataatcaaacagagcaggtggttctgcagaacaaacctctacatttgggaatgaaacagagaagcagaggtattgctttcatttaagtatgccttcagaacccagaattttctagaataaacaataaaatcaggcacgtgaaagagaaaaatataaaaagacataatgtgaagtaccactgtccttactccttaggctctctcaacatggagtcccccagactttgccaactggcatttctgaggttcaaagtactgaatctgggtgcccagggcttttctaggcagaggattgtgtcagaaaatggaaataaatgctggctttgccacttgggcaagtaacttcacctgcctggatgtggactttcatatctaaggtccatgttcctttctactttttcccctatcttgtcagactggagggcaaataacttacgcatctaatcatataacacttaaatttctttgataaatcaaatgctcttaattgccttccagttacagtgggctacttttattgttctactatgcaattcttttactagcattatttctgtcagtctagaagttgacctctaaaacagaatctagcaataattaatagaaataacatttatctgttatagatagatattgaacagtgccaaaattgtatatgtaagtctttaagcttcttattattttttcaatctattcctaatgatctgataagctttatttttcaaattcaaaacaagactagatgtctaataagaggtccttgaaggggtgtgtgtgtgtgtgtgtgtgtgtgtgtgtgtgtgtgtgtttataaaatgacaggaatgagttgggtgatttcccacaactaagtttcaaattgtagaaaatacatgattaaaatatttctcatatatattttaggaaattatatatttatatatattttcctatttttagggaaaaaatatataaaacagcaagtataggcgaaacactgaaaacataccagctaaataaataaacattactatctagtgctgtaaggtaggaagactctaccttaattcacccacagatgaacatggctacaatggtgtaaagcaaaagaatgtttctttctcagaagttggccgaagaaatatttctaagttctttctccctctgccaatataattcaaatgtcaaattaaaatagccaaacttctgctgataactgaatgtattagtctgttttcatgctgctgataaagacataacctagactgggcaatttacagaagaaagaggttcaattggacttacagtttcacatggctggggaggcctcacaatcatggcagagggaaaggaggagcaagtcacatcttacatggatggcggcaggcaaagaaagagagtttgtgcaggggaattcctctttttaagactatcagatcttgtgagacttattcactatcatgagaagggcacaggaaagacttgccaccatgactcaattacctcccactgggtccctcccacatgtgggaattcaagatgagatttcggtggggacacagccaaaccatatcactgcaataggaatatgaaagccagaatttatacttaacatataggaaagaaggagacattatagatttttaagaagaaatgaatttcaaaagggcctactgttgaaccataaacctaaaagcagtctccttcacccctagctaagattcaagagatttatcaaaaagctgtcctaacttagcgatagcccagaagttttcaaccacaaggtcagaaccttccgaaggcaaacattgcaatacaccttgagaattttccaaacatcacgtgccaaatgccccagagattctgaaatgttccctctcttccttcttgccccacagcctcagaaggggccactgttattcttggaagtgcattatatctgtaagtatgtaaggctgaagtgcttgccattcactagtttagtgcacaggaagcagcttgtcactatcggccctgtcatcctgggcagctcacttcgtgatcccagatctctctttttttttttttccacctgtaaagtaagggcagtagaactaagagagttaaagtattttctagctataaagatacaaaattctataaattctcagggttataagattagaagatgaaagactaagccctgatctgggcttcatagactctaggctatattgatttctataagaagtcatttgtttatgaaatttgtgaaactgtctagacagtgagcaatacacaaaattatctgcaaatgtatttcatcttggggtttttggtgctttacctagctttagcacctagctgtacaattgagggctgcatatttctttatttatttttaaagatctgtctttagttgaaacgaaaatgttcaaacaatacctctcagtgggctagaaaataatattaatttcccccattcttttatacaccagactattaacaaacatcagtataacatgtttccttataaaaacattaatgattttaaaaattagtaaagattaatattaggaaatatttaaactaaaaagaaaaaagctgattttaatttagaactttacagttttccataaatgtatgtcatttatgaacataatttctactttcttggattccttttctgaagtcatttatataaatgtattttattgaacagtcagcaatcaaaataaattactctttgattttagacctcaaaatcattagctaaataaaaaactctgcaatgatcaatcaaaattcaatattagattatacatttctagagggcaaatgtcatgcggcattacctttcgtatggtttaaggaatcctgtacatcaccaagcaagcattagatgcttcacaacctgctttgtagtaatttgcacttccctgttatctcagatatccaaaaaaccacattttatgaactggttacttactgtgatggtatatactgcagtttgaagttagtgtcctgagtaggacagaattcttcccagttgatttaagtgaagagactttaataaagtaaccagttacaaaggtgcaggcactgtgaaagaaacaagggataatgatgataggcaagtaatagacaggaactgctaccagtccttgagcttaagaagatggggaggaaatattattttagggttgccagtgatagccagagtcctagaggaggggtcacccagtgggaagggatacagacactgccagaaaagtgtcactgaaacataaaggaggagaggaggaaatatccagagttctctcgccttctgtgtgctgatctaaggattccattctcccattgacaaaacaaactcaaagtcttctatttaaaaaggaccggtgattcacacatgtcagcacagagctgagcagaggaggggaaagaatggatctgggggccaatcgaaggaaatccagtacagcaaatattgcattgcccccaacacaataatttttaattcatagaaaatacattctttttgtcaaaatttgcttaacagaggcaaaatttttcaaatagaatggatatcaggtcaaattatatttcataataagaggcacagaggacagcaaatggattagggaacttttattgggaagtaattaaaataataaactagaaagcaagaaatatgcttccaggagtctgggagcaggagtaaaagagaggaggtcgggttgggttgacagaaaggatgcaaccaaaatctccacactgtagagaaaatctagaaaaaaggattgtgccagggacataaaatagggaaaaatcaagtcttaatcattcgtgaagccataaatagaagtcacagttttccttagctcttgttgtagagaaaaggaaaatcaaaaagaattttcaggggctcttctttctttttcaatatctgtctttccaatatctggtttctgagtcctaagataaccatattttgcccatcattaatgataaactgcctaaattcatgcattcaatcatgcatgcacattctttatggggtaagtttctctgtctaatttattggaaaaaccttgcaccattcacaatgcctacctagcatatagtaggcactcaataaacattaattgaataaaaaccagttaaatgtctgttggcatgacattacaactttaaagaaaatattataatctgtcagttaattcacaaacataaatgactaatatcagaatgtttacaattttgccatagatagcaggactaagatgcctagagagcttgaagtaggaagaggcacagatctacaaaaggacagctgggaacacagaaaacaaacaaaacttttcagagacttcacaactttgtcaagggaaggttctgtttaccatcagctgggaggggacaaacagcagctttgtgaaaatatgtttgttgtgtttagtgccaagatgcaaagttcagtttccaggaatttgtggtgatttattgtatgttttaaacaatcttatatagaattcttttcttgttacaaaagatcctttttatcatcttggccatatttccttcctaataacagatcattgagtctgtttgaaagtgagggaacagaaaattaaccttagtttcaaactttgaaaaaaatttgtttaagcaacctatgctttgaaatatcacaatactttatggaaaattaatattagaacgcagaaacccggatcaaattataaatctacttttctagaaagtctcatcagttttctagaggtgaacttataaattcagattctattaaaaaattggggtattctgaaaatatggggtattcattactttttgattgtgctcatctcggaagcattgataaaatatccccctttgccaagtatatatcaatatttattttagctaacccagctggtacttaataattcaacactattttattacttttctctggttaatctattgcagcaaagatataattgcttttccataactaaacccctaactctttttatcatttctactctgccatcttagacatattagaatgatgaatggtcaatggtaagaaagggagtagggaggaagaaaaagaatataaacaggacaggtgttgcaaaaattagggtaatagcctaaggtctatcacaggagttccaaattctggtctaccatggagtgacctgggaatcagcttattcatctataaaatacatgtgttggattcagttatagctaagattcccactggctctgaagcaatgcacaccactatctgtgggataacacctcttttctgttcacttgaagctcctggtttaaaaacaataagatatcactccttcattcacccaaatgtgagtgattattagcatcatttctagctgcagcctgggaagtgcacaagtcctaatgatgacttaaaactggcatgttctgtgtccaaaagggaaaaatgggctgtgacacatactcataaggtctgcaccacagggtgaaaaaatgaggcctgcatatgtctaaatttttgaacagcgtggctgacttttgaccttacttagcattacttgaagcagcttactgacgctgccaataacatcatacataatagggcacacatcttgtaactgaaccataggtagtgctgagcaacataaagaatccaggcaatacatatgtaaaatgtaaactgctcaaacacaatagctactgaaggatctgctagtacatacactgattgcttctctgaggttcaagagccaggttttaggattcttcaatggctgctgccatggtcttgttttaaaaagcctcaatcatttctcaagacatcacacgtaacaaaaggctgcatctatttctctcaatacagagctagcctgatagtagcagatatgtttaagggcatagaaataaagtatgccttccagaagttggataaaagagaaaaacagcctttgagaattagtaggtaccactctaatctgaagcttgtactgtccttttcaatcctagcaaagaaacaattaataaaggaacccattaagacctgattattgcagctaaaaaaggaaggtagaatttcagtcctttgaagtaactgagaatgattcaggcctcattacagagatataatctacattcatacatttatgttagtgattcaaatctattgggagagattgaattccgttaaatagtgcatctttcctgtggaacttttctcaggctttctcgggctaacctaagaggtgacctaacaatgcaaagtagttgggtatttagagattcaactgtgctgtaaaagaaaggctgcacagaaaagaaaaagaagaatgagatataatctaaaaagctatgtcagcttttcctttgggctgttttgtaaatgccctcttgtcatcacgctgtacagaagagcagcgaaggggctctagaactttcaaacactgcacctgctgcaaccagattttaatatgaaagtttaaagacatcttttccctcattttagacagaaaaaacaaagaaactcctagctaaaagatctgaatggcttcttctactggaacataaagttggtagatgtgtgtatgagagagagagggagaaagagagactagctttggattggaggggcacatgtctagggtgagtttaacaaaaattcttaaaccccaaagtggcatcaatagtgttggttcctattgtacagaaaccccaaaataataacttcctgtgttttgtaacttttcacagcagaatctttattgtatggtttcatcaaacataatttttaaaaaatgtagttttaattagttgtaaattcaaacatttggattcttctggaccattgggctgaaacccaaatccatgggaaacactacactgtctttcaggcatttgtcctctcaggtataaaactgtgaactaaaacattgaaattcgcactgttggttcatttttcagtatcctaaagaaaaagactcgcttgatgtgtgctctttatttgcttaactttccaattaatatctacagaaattagagctaattatattaaactttaaaaacctattgtaatgttcaccacattgttgaactcttctaaataagcactgcatgagttataactaatgcaattaaaatcctgattctagtattaaatgattctatttcaaaggatttgaatacacagaaaaatataagaacattcatgtaaactcatttttcaagtcactaaatacttaattgagcaatccttcctaatgctcatctctaacgctaattcttttttctttgcatttcctctggttcacaaccaatatggaggtcaaacgcacatcatagggatcctagcttgtgtgaacacagactcttctaattagttccctccaaattacagttgctgttgttaaactcccagttcaccttgaagtgtttctctgtcttacattggcagcctaattttaggttgaaacatatgaaattaccacttttgtaggtacaaaaccttaaaatgttggcaattttgtgggcttcaacaaaacacaaatgtctaactgtcctatgtgacatagatagttcattccagtacatgtttaggcattccttctagttaaacgttccctagtttagagtcattcttaaagaagtggtcctctaggagctgtttcttattcagattggaatggattatcacagtatttccttttttgtgcctcttaactcttggcaaaggtttcttagccttggacttagttctgtcaatacctgggctgtgagctagtttctgcgagcaagggaggagttggggtggcctgaaagagtgtgaaaaggagaggaggactagtagtgcagtgatattgtaaaacagagccctttaaacattaaatgtgaagatagaaaaaaaaaaaaacctcccctttatgacaaagtgcaaaggaaattgcataaaaaagaaaacagacagcagggtattcagccaaattatatggtaaaatctttgcgatcgccataaagtgcgtttgctttgaagtgcacgcatgattcagtgaagggctcatgttagcaattagaaatcggttatttgggtccctgatttcatttgcgccgagagaggcaacttttaagggtgacgataaatctccctgagcttaaaaggcagagagggccaaagtgtgaactttttacttcagcaacggaagcgagaaatcagtgattcattaaagaggagacctccttggaagctggcagcagaggaggaaaggacactaattatgtcttccttttctgtgctcgttctgaccagtttataacctgctgctttggacggtttaaaatcctcagcatcttctgctttctcccagccctctcctcttctgggagtgagaaggggggaaaagtcagccaagcaccaggctccaggtggctctcaagtacttcactgccaaaagaaatgggggtggggggaggagatcctacgctggaaagcaagtgagaaaggggctccccagaagggattggttcaggctggaagacagcaaaattcggaaagcgggaagataccgtcagcgccgtggcccgcgctgcaagcataggacgctttagcagcgaattagacagagctagaggcgccggcggaggctgcggccgcaacagccgcggcgaggaagggacctggcagcccccgagctcggtgcaaaggcatcgcgctctctcctcgctcccctgctcccccacccccttctctgcccctttcaccctccctctccctggcgttcccagcagcctagggtttcagatgtcccaccgccggttgaccccctcccccctcttctccacccctgcaaatgaggtttgaccagcagaggcagagcccacctctggcttagaatcactgacatttagactccaggcttcaacctgtttacaagcggactttccaaaggaagggggtgggagatagggccatacaaaacaccagccgccgtcccccaaaacaaaaagtgactttcggcagccttcaaatcggcaggcaccactaaaaacagaaaggaagagagggaagaaaacaacggcgactgggcagctgcctccacttctgacaactccaaagggatatacttgtagaagtggctcgcaggctggggctccgcagagagagaccagaaggtgccaaccgcagaggggtgcagatatctccccctattccccaccccacctcccttgggttttgttcaccgtgctgtcatctgtttttcagacctttttggcatctaacatggtgaagaaaggagtaaagaagagaacaaagtaactcctgggggagcgaagagcgctggtgaccaacaccaccaacgccaccaccagctcctgctgctgcggccacccacgtccaccatttaccgggaggctccagaggcgtaggcagcggatccgagaaaggagcgaggggagtcagccggcttttccgaggagttatggatgttggtgcattcacttctggccagatccgcgcccagagggagctaaccagcagccaccacctcgagctctctccttgccttgcatcgggtcttacccttccagtatgttccttctgatgagacaatttccagtgccgagagtttcagtacaatgtggaaatggatactgacacattgtgcctcagcctttccccacctgcccggctgctgctgctgctgctttttgttgctgttcttggtgtcttccgtccctgtcacctgccaagcccttggtcaggacatggtgtcaccagaggccaccaactcttcttcctcctccttctcctctccttccagcgcgggaaggcatgtgcggagctacaatcaccttcaaggagatgtccgctggagaaagctattctctttcaccaagtactttctcaagattgagaagaacgggaaggtcagcgggaccaagaaggagaactgcccgtacagtaagtaacaaatgcatgctcccctccttccaattatccacccccagcccacacgggggggaaaaatctgttccagatgtggccagctaaatatttacgtccccaacccctgtaaaatgattaagtggaatactttcacactaattcaccccccaacccccgtgtatacattgtgctgccgcatcccctcccctaagcgcgctcccttcacatcccccaccccttgccgctctacccaccccttccctccagcctgtcactagccggaccacgcagggcgctcaagagagttgttgcagtgcaaagatgcccctttctctctccaccgcctttcccacctcatccaaagagcaatttttccttccttctggaaatggctcaagtaaacacattttgtttcttttccctggcaatcttgttaagagttttgggacaggctcctcaagctgaaaataattatccgctgtcaattataggggctttgtgggaactttatttaagaaagaaaagtcaattccactctctccccacccccatccctttaccccactacctctagatatgagcgaaaagcatttttctggttttgatttttgttttgttttgttttgttttgggtcccttatgttagtttgagtgattgcagtccatgaagttagcttttcaggcaccaccgctgctatttgtcttctgcctgccttccctcttggtaacatgatgctcatgtctgcattgtcaatagcgtatgcactgctttgtggtgtcctgttgtactgtttcttctgaaacctctcatattgcagagccatactactacagcattgtaaacatctgggactggattcacacagacctcacacaaatttcattgtcattcttttattttcaaagtaaaagtcataagtctgtttccatggctatagtttatcccacagtgtgacattttctcctcagcgtaaattatgcctgggatccctacattttggtcttgccttttccctctctctttccttctttctctctttcccttctttctttcttgcaggggtgtgggctggttgggggaagagaactagaagaagaggggtggatattgtgtctcttcttgaatcaacccagcaaacccagattactctgttgacttcctttctcagatactttcaagtggtgagacttattcatccactattgattgttatgtgaaaggaacccaaggctctgtaatggcacactgaagacagtagacaatgatgtttaaacatctttagtgaccatttggcattatctcaatggtaaattccaagtcacctttaaaggggacatttttgtgttagttgttcaggaattctaagcatagattgtcttgtcagttaacttaaatacgtcagtcaaacatttcaagattccttggtttagaaagtaccaggtactaatgggaatgacagttgaccagaatttagcattttatttttgaatacaaatttacaagaattaagaatttagttttcttctgtggggatgcacacacattcaacattaacttctgtttctcctcagccactggttctatttactaaaattcacaatatgtttataagtaataaaaatatgtgtagaggtgcttttaaagtgtttcattttatgtttcatactaaagatattaagtaccacattatctgattcaaagaaagtagctgaaataatgtcataatgatgacaattatttttgcttaaaaatcatttgttacccgaattcattagatcctatgtatataacctttaaggtttttcgattaaaaatttaaaaactttatttacttctaaaataaaatagttgtggtgtcattcagttagcaggatggggaagaagctatccaaacattgggctggacagagtgagctgggaattaacaacaacaacaaaaaattctgatggactcatttcttatttttcatggagaaaactcaaaagaatatgataaagtttcagagtgttatccttgagcaaacatttttctttttaaaaaatgtttgtgctatactttaaatgtctttatgatatgacttaaggtcaaatctgctctgttttagtttacacaacctaaattgctattttctagaataataatcacgtgtgattagctgcagagtaaaatgatttccacagtacacactgaatttcatctttacaataagaactatctgcaaagaagaaaagtatacaatatatattgtataaaaggggtgtagaaaagttccatcctaactgtccaaaatatactaatattttattttctctgtgataacatatattacttgttataatgacaagctaaatatcttatatggtaatgcaatcttaatcaacggttaacagtgaaaggggaggggttcactctgctaaatattgtcaaaccataaataatttaggctttccaagaacatctgtgtcaaaacatagcaagtgaaaattagagattgaaaaagccttaatttcacatgtggccaggtaatctaaatgctgctacgatttccagctggactgattcagctgaactacatggtatcattaagatattgtctaaacgttgcataataacatgtgaacaaacttttaccatgcctacagggtagccagccagctgtccaccaaatggtagcttgttaaatactaggatctctaacctctgaagagtgtcaattccttttccaaaaaccacatttcagtaacattttcctaaacaagttattaattattctcaatacacaaagctgttcttttgaggtttgcttatttgaagattaattttctttgttacttttgaccctagtattattgctgctaaaatacagtaacagcttatctaagaggttatatgtttttgttgtcctgggtaattaaacaactgttttctggctttttgccagcagaatgctaacaaaagggaagtaagacaatcattcataagtattgcaaaatcatttttaacttctactttcaaagctagttcccagaaattcgatggttctaaaaagactacatgtgttaacaaagctcttctctatatgggtgattattataatttttgagggtggggggctatactttttgtttgcttctttgccatgatatgagagtagaataaagagagcagagatgaattatgtttctcctgctagaagtctgagaaagcttgaataatttagaatagctgtggtgtatctgtcactagatatgtgtaggctcatttaggttttgttttatcattctttacatctagagctttgcccttgaaaccttaccactcggctttagttctgacctcttagaaaggctggatacagctgttaggtatccttgcaactgggaccagttgacttatttctggatgtgagtaaaacagctgtgagcttctcccatggttgtcatttgtagaaaagagggatctagtgaaaggaaaatgtaccctaaacttgagacaattaagaatagatattccaaaaagggaaactcacaaaaaaggctcctgggcctttctgggaaagaagaatgggaggcaatagagaaatcaatatgtaaagagtatgtagtataggctttatctctttaaatacacacttcatttaatagtcataatagtcctacaactatcaacatttttcaaatttgaaaactcatactgaaaaaagtaaattgtccaaggtcattcaactagacatgggcagaaccaggattcaagccccagcctattggttgtatctctcctttcttattgtacctttctgctacttccaacattaatatcaatttattagaatttgacacctcaaatctctaaaaaacaaattatccaaatctttacttgcttcttgctgtgaacacccgcagttctttagaattaaattggaacagaaataaaatgacaattgcagaaaaacaaatacattaaacgtgtcattgcaggtggccacatgatatcagacaaggttagtgtattctctaggtaaactctctcttttgatatttgggaatataattgcttatggatacacacaaaatacacatacatcaatctcactcatgttaacagaggtcattaggaatacatgactatttaagaaaaatccatgaatgtcattttatatagtaattgtttacagctgagggccaaatgtttaattgttcccatgtgtaataaaataatttgattgtaaatacctgtgataaattggactgttgcagaaacttctgatatatgactctaaaaagggcgacatcttagagacttaagccatacatattaagaaaattttaaaataaacctgcaaatcaaaaagacactttaccatataaaatgatagattattatctgggattattactttttaaccaggactagagcttattgtaggaagctaaatgaagtgagaaaaaaataattgttgaggaaaataggaactcagaagtgatcttctaataacgacacaagagttttctgtgaagaaaaacaatttatggcttccactggtatcttatttcagttgtggttgtttctagaatttggttgcataatttataaccggcagcatttaatcacgagcattgaggatttatgaaggtggaagacactgtatttaatgtttacatgacattgtcctgttacctttactgcattcctaccatatggaccctccactttgatggatttatcataaatctattaaaaatgcacaattcaagagagtttcctcttcataaacctgatttataacctcctacgaggagaaacctaaggaaacagttgtcaggaatcagatgcccgtattggagcatgagaattcagagacaccaaattctaggtcttggatatttcagtaacctattacctaaaggtgtgaatgactctttaaaagcagttgttttcaaaatgatgtttaggcacagaattttaacaaaagaaaaagaagtagaagaagcgtgtcttataggatcaaataaactccactgtcttcatagtttcttctacatttatgctatccagtttagagtgaaaagctttattccagtgcatttctttagaatttaaagaactgatagtagaacatgaatgaacactttaaatttctatacaattactttaatgtccagaagcaaaccccatttattatccaaatgtctaactttccacaagccaaaatgttgaaaaaaagttgacagctcatttgaaatggaactaatgttcctcccatttatgagctgcctgtgaataactacatctttcctaagccttaatgtctgtatgcttatctgacattgtagtgcaaatgatatttctttattatgcttcagaaagaagagtaatatatgtgtattagttcaaagtgattttaatctatcttaacattaattctgtgaactttgcaatgaagagtaattcagatgacatttttagtattactgttccaacatctgtcaacatttatagttgatgtttgcttaatataagtaaaatattagaattttccttccagaaattataaatctattttattttacagtaagatggaatatacaattcatgtttatgtaattttaatacagttttatcacaatatatacaagtaatcaacttcattttgtctcaagtcatttatgcagaaggatttaaatctttcatggtatattgcaatgatctaagataatttacatttgacatttgaccaagggtgtttattactttgtttcacagatttaaaacattattttgtaatcggcactctttcttctcagtgcatgttacctttatctgtgtcagtcagtcagtacaacaaagaatagcttagaaatgtacttttaaaatttgcgaaaggaaatatacctgcatcttggaaagccactagtgacactctgatactgaattaatgaatacaaaatgttgatgttttacagaatcagtttaaaacccagtacttaatttgtatagattttacacaaatagaaagtttcaagacatctaaaagggagccaggtcacccacaaaataatgaccttaaaggctcccttccttttaaatcagatcaattgtgttctttctttgaacgctgtgttctaattggcacaatacatcaaagaagacactcagagtagattcccatgtaaggtggacaactggacagtgactttttactgccgctaacacgtgcatccaattactatctgatagattcatagtgctggcagtaaagcattgccttattttatagttcacctaataattcttcaacctaaacctgtccacctttacctatacccattctgtcagtatgtgcattattaatgaataattttcaaagttttggcatgcttcctgcaaagaatgatgtcattgagctcttaatgaatcatctaaccctaatagaaggcaaagtattgattaacttgatataccccaaatttcaaagaattgtcaactaaacctaataattgcaccacaactagaacctaattctgaatagggtgggttaaattccatctaattctgaatagtgtgggattgctgcaagatttagaacttttttaaaaaggtatttttaatgtttttctgtaattattattacttttcttcaaggaccttgtgttaacatgctttactgataagcagacatgttatttcatccttaaccttttttgctcctgtgttgaggacaacttgacatgttcatagagtctttacaattcaaggctcattgacttctttctaatagctttgttttgagttagtctgtgacaaccctgcttctgagccattgtaaatccctaatagtttatcgtcccttcctcactccattattttcaccttcttggttttgtgtgtgtttttttttttattacttttatctggtttctgaactggctacatacctttaagcccagggaaagtcattcattagtattacttggcacccaaggtgacattcagggccagaggcctagacattttcagatgcgtagcatctaaagctgatagttttgtttttattttgcataaaaatcttcaatggtgtaaattcaatatactccatcaggaccgtcttctcatttcgattctgcagtgaattccttcttatcccagcattccaggtcaatttcttttaagctctgctgtaagtgaagtggacaaaccactgataagcccccttcagagtgctgattatcccattactagatcatcattctgcatttttcctccaagttaaatttttgctcccaataactcttcctgcttttcctattttcttttaaattatttgcatacataacacttactagctactttgccatttttctcacatttttgcctttgtctgggctaccatgaaagaaagaaagtgaagatgattttgaagacagggtctcactcatgatcacagcttactgtagcctcaacctgctgggctcaggcgatcctcccaagcagttggaactgcaggcatgtaccaccctgcctggataatttgctgatttttgtttgttcgttttgtagagacagggtctcactatgttgcccaggcttgtctcaaattcctgggctcaagcaatcctccagcctcggccacccaaagggctgggattacgggtgtgagccaccatacccagcctgaacacttatatttttctactttagttttcatttattttaaaaaagatgaatgctgatttggaggtctttgatattcccaacttccagaatggcacttagattatcaagcttctctgtgtacccctgtcaaatatatgtggcttttaaaaataaaacctaggttctcaataaaactttttaaatcaggaaacaatgtaaaataggtatatgtatgtcaggtgaaacaaatatagaaatacgtatgcctttactaggaatttttgaaacaccaacaggagttagaatctgaattaattccataagtgttttcatatacttctaagaattttttggcactgattgatgaattagatttaagtctatcatatgcagaatctgactattgacatatgttaaatttatgttttaataataataaaagtcaagcttgtttttacaattgtttccaaattttaagtaactttaatttactgatagaattattaaaagaagaattaatattctgtaacatggggtaaatggtaacatatggacactgatttacatactattgatagtctaaagtaagatacctttataatggtattcatagcagtaattaccagattttgggtgtcattttttgggaatatctctgcagaaggatatgattccacaagtattaaagaaaagtgctagtgatgttaatcacattatagtataaaaacttgatgaacaaaaatagtgttttagagctcaaatatgctgacgtccaggaagcaagagagacggtaaagatcacataatgaaattttttagaagccagagggaaaagtagaaaaagagaagaggccctagagtgtttagacacatactgtgaaaggaggaggagatgctttgctggagtgatgaagacaagggttttgaactctcaggaaagagatcaagctaatgagtagcactgcgaaagggctgacatgacaagaaaggtgtgagggaaatataacccaagccctggcattcaactggatgttaaattaactgaaatgagaacctatgatctaagagaagtcccacagaagtcatcgcagccaggctatcaaagtaaggaaagctaagtcccagttcctgctaaagaggaggtatgatagagtgattaaaagtatgggctttgattcaaagggataaaaagtatagtcccggagtgaaagcaggctttgaagccgcagacctgtaggcaaactgcgaggtaagagttgataactttgggcaagttgtcatcagtaaaacaaggatattaacaatacctacctttttactacatggtaaagatgaaatgagatcgtatattcattcattgattcattcatctgaaatttgagtgcttgctttgtgtcagatagtgtgtgaggcacgaataaatgcattgttgaaaaaagttggtctttctgctctcatagagcttacactctccacagataatgtcaaaaacgttaaccaagaggtgatatgatgaaaaattgaagtgagtgttatcaatgacacaagtacagtgttttaatagaaaacaactgggaactaccccaaagagcactgctagagaagccttttgaagaggtgagaagggaactaccccaaagagcactgctagagaagccttttgaagaggtgagaagggaactgcaaagggagagtttggtgcctcattcaagaagtacagagaaggcacattgaggctggatgtggcagaagtttgaaatctgaattgacacacacacagcttaatggtgcctgtcacatcataagccttaatcaaaaggatactatatgaagaaaaagtaaatacgatgcttcctcttatttcaaggggaaacatcaggaaagcaacaattatattattcgatgaagtggaaattaacaatgctggaattgaggaaagaggcaggaaggagaaatatacttggtttttgtttaaaaagggaaatatcggccaggcgcagtggctgaccctgtaatcccagcacttttggaggccgaggagggcagatcatgaggtcaggagatcaagaccatcctggctaacacggtgaaaccccgtctctactaaaaatacaaaaaattagccgggcgcggtggcgggcgcctgtggtcccagctactggggaggctgaggcaggagaatggtgtgaacccgggaggcagagcttgcactgagccgagattgtgccacagcactccagcctgggcgacagagcgagactctgtctcaaaatagaactacctgaaatttgatttggaattgtaatattcatactgttctgaagttttggggaaaaagttagaggcctggttctttaagaaattggtagaagaaacagattgagcacttctaatccaaaattctcaaatccaaaatgctccaaagtccaaaactttttgagtgccaacatgatgccacaagtagaaaattccaaacctgtcctcatataacagatcacagtccaaacacaggggcacagtttattcagcatccccaaggggaaaaaagaccctcccatcccccttcagctgctgttgcttaacagctgatacaggtattctggtgatgctactgtgctgcctagttacccccaacacatgattttttcactgtaatagtggtatgtcatgttgtttactcttaagtacttatgtatgaataagtgtaagaaaatgattgcttatcagtagcatttaaattcagagtcaggaatgatggtgatgccaaacaaccacagattacctacatcaacggctaagatagtgacatctttgctttctgatggttcaatgtatatggactttgtttcatgaacaaaatgatttaaaatattttaaaaaattacttccaggctgtgtgtatgtaaaccacaaattagttttgtgtttagacttgggtcccatccccaagatatcacattatgtatatgcaaatatttcaaaaactgaaaattccaaaatctgaaacctttctgatcccaagcatttcagataaaggatactcaacctgtatttgaaaactgaaggtaacttgaggagagaacaaggtgcttaaaataaagaatagaagatgaatattttcaaggacacaagctgtaaaaggttaaaagaaagaaaaaaagaatagcgaaataggtaaccgtggagatttgatgactatagaataaaaggcaacaaagaaaagtaattcttaatttttaaatatttcagaataagtcttatatttcaacttacagtttcgagacagcattatcacagatacttagttcttattaaacttggtagttgttttttgtttctcatcctattactgtgacctttttggctcatacccttaaagcatttgtagtctagaagtagaaagaggagatcatcacagggagttggaagagcatataaggcagtttctactcaatgccaagaagcagggcagaatttaagtaaacagcagtctctaactgagggagagatgcatgacatcaggaggtcacactgaggataagggactccagctagacagagataaaacaagagaaggaagaatattctaaacgaaggcacataagtgtgtgggtgcagagtcaaacatgaagttttcaggaaatcacagggaggaaacaaagtttgcatgcaggtgggcatcttctgacagacaaagcaaagtacagtagaaggtggtatcatgtgagagggaagtatgtaaatgtatccttacatttgtggatctaaactttctggcaaaatattacattgacatgatttttatttaaacttgccctttacttttttttttcatttttactttttgaagtaaaaaaagaaagaaagtggaagaatatttcaaaagagtattatctatattataattgacaatctaaatatagtaagtagcaagaaattgtagcttaatcaaaagaaaaaagaactaattttatactagggacatggaaaagaagagttcttctgctcttcactaaaatgacattattcttcatatttctgatttgccaaatgatcattattttacaatttaaaatacttggaacttcaaaagttcttaatatgtatatttcactgtgaagaggttttgtaatttccagcaaatccccaaaaggaacacctgaagcatcagtatttcttgctctagttgtgggttttttgtttttttttttttttttttttttttggcatttgtattctaacttgtcttagatttacttggtttagataatcagaaaaagaaacaaagtatgctaaacttctttttctggaaaaggagtacatgtaagtgttttttaaacaaactaggagaaacatacagacagcatatatacgactacacccccctactgacactatgagctcttgagtcagacttcttggtgtagaatctgggttatttataaaacttcatagttgtgtgatcgtagccaagttactccctgggtcttggtctctgcatcttttaagtttagataaaccaacctcaccactgttggaagaatgagtcataaatttacaaatgatactataaatgtaaagttgtattaaatataggacctaacaccatgtaagagtttgacaatgttagttctcattactcttttatgccatgactgcttgtgttgttactaattattccattatgtgaaaaattccctaaatcattgaataataaaaacttcagcagattaatgctttcatcaattgattctcaaaaaaattttgtaatatgggtaagatcatcgttgttatacccatactatgtttagatgagaaaattaggcctaaaagttattgtgccagactgacattatagagttaacataattgaggataaaacctaggccagtcttagtgatggtgatcttctatctttgcttgcctgggacagtcccagtaaatgtctcttgttctggcattttattattaacacctgttcagtctcagtgtactatcacaagaccatcctagtcttaatcagtgtggtctatgtaaggcacaaatccacacaagctagttccctcttagatactactacattccatcacatcccatgtcatatgtcatataatatcatgtaatctctatattccttcacatgtcatataagaccctcatgatttactccctaccaactccctggcctcgtttgttactacagtgcccattatagctattttatgttgatttcagttctagaacctgccttgtcccttcctgttcagccttgccagacactgctaggtcggcctggaatgatgtccctgccctctttcccagctcttcttcttttcaaatttcacttagatgtcatctctgggaaaccttcctgctgtcctctcaaaacctgtgcttccaaaaaccatatacctagcattataatgcaataccacacttgattagttgactgtttacccatctagtttcctcataaacagaaaacttgttgagagtgagaaccacacctcactgacttttacatgcatgcacttaagatagtatttggcatataataagtcctctttctatatattattaggtaaataactgcttttaaccatatgatcttggtcaacttacttagactctcaaagttcagtcacctggtctggaaaggtgattaatatgctacctacctaaaatgatggttgaagtaaattagctcttaaaatttcacttagttctaagttctacaattctgagaacctgaaaaataagttagtagggctatcattatttaagagactgttaagtacttaaattcattaaaatttctgaattaaaaaaaatgtgtaatcatgaagtgaatcatttttcatgtttctctacttttcctaaggttactactgataacattcagtggggattaaaaattactttatcccctttaaaattcctgctgactatgagacagttatttctagtttcagagttgtgtttatggattcttggataatttggtggttattaaaaaatgagcaattcttagtaattattttagagaggaagaataaagtgctgtaaagagtgggagtaaagggagtggtcttgtctgtgtcaaaacatttactgtggatcttaagcaggtcatttactttatcttggcctcagagacttaatctataatatgagtgtattgaactacattattattaaaatattttagtttagtatatttatttcacagactaaggaccagattcctggagtgtacctatattaggaaataaagctatattatgctgaataatgagcacccaaagacatcaggttctaatcctggaacctgtgaatgttactgtatttgtaaagtttttgcaaatgtgatcaagttaaggatcttgaaatgaggagattattgtcattgtccaggtaggcccttaatgccatcacaagtgcccttataagagagacacaaggagattagacatacgtagaagcacagaaggcagaaggcattttgaaaatggaaacagaaagatttaaagatacaatgttgttgtctttgaagatggacaaaggagtcatgagccaaggagactggaagaggaaaggaacagattgtctccctagaacctacagaggagtttggccctgctgacaccttgctctaggcccagaaaaattgatattggatttctagtccccagaacattgagagaatagatttatattagtctaagacaccaactttgtggtaatttgttgcagaagccataagaaaccaatacagatatggtacttagagcagggtcctgctgtaactcaacctaaaaatgtgaaagtggcttgggacgtggacagtggacataagctggatggattttgaagcacatgataaagaaacctggatttctttaaacagacttctgttagaaatatgaggataaaaggtgctaaggtgaggatttaggaggaggtgtgaggcacagtagagaatgcctacctcatttagagaatacatataacatcataaacagaaagctggtggacatattaatattaacagtgctttttttgagggctcagaaggaaattaagaatatgttattgaaaactagaagaaaggcaatcctttcagctacagaaatgtagctgaactgtgttctacgttgtatgaaaaacagaacgtgtaagtgatgaatttggatatttagctgaggaaatttccaagcaaagtgttgaaggatcagcctggtttcttcttcctgtttatagtaaaatgcaaaaagaaggagataaagtgaaaaaagaactgttaagcagaatcaaaatagcacttgatgatttgggaaattctcagcctatccagattgcaaaagatgctaagttgggagattcactgttaggaaagcatgctctgaagagaaggctaagggtacgactagacaaccttatgatagtgctgaagaaatgaaacatgtgatggatggattccctcagccacctcagcagaagtcaggaatagagatgaggttacctaggaaagatttgtagagaaccctctcatggcatgaatccctgtgacatacatgggaggaccacagagtttttgagaatgttgtatcagcagaaacactgccagctggaactaaaatagacaaagacagagcaagttgaaggaaggctgtcagactcccaaaattctacaggcaagttgataaaactattcagctgcaaacacatgatagctttaaagaaaaaggatcaccatgaatgcagagccttgggtacaaaggaagtgcagaggcatagaagcagagactctagccatgtgccctgaggcaggaccctcaagtcacagaggctgattcccaggccttgaaacctagtggagtttaccctgctggattttgaaattgcttgggaccagtgacttctttcttctttacatttttctccttttggaataggaatgtttataactgttatactatgcttgttctaccattgcattttaggaactgataactttttttctagttttatggactcagtaatggagaataattttgcccaggatagatcatacccagagtcttatccatatctgaattccattatttacattacacaatttgagatttttgagctgctgttacttaaatgagattttgggctttaatttaggtaggatacagaaggctgaataatggccacccaaaaatatcaggctgtaatccctggaatgtgtgactattaccttatatggtaaagttttgcagatgtgattaaattaaggattttgagatgaggagattatcctggattattcaagtgggcctcatataccatgacaaatgtccttataagagagaagcagagggagattagatgtacacacagaaggcagaagatgatttgaggatggaagcagagatttgaagatgctacactgttggctttcaacatagtggtaaggccatgagccaaggaatgtggccaaggaatgtggcaccagaagctgaaagaggcaggcaatggacgctgtcccctggagagcttctagatggaatacagccctgccaacaccttaatttcagccgagggaaacagatattagagttctggcctccagaactgtgagagaataaatttccgttgctttaagccatcaactttgtagtaatttgttatatcggccctagaaaagtaatacaggaatctaagacaactttgtgcagcccaaattaaggataatttgacaaaaacaaagcactatcttgtggtagatagtactaagcatggactcaaatagatgtaagttctaacctcttaacgaatggtgtgagtcagaaatgtctctaaacttttgttttctcattccgtctatgaggattaaatgaaataatctatgaaaagtatctaggaaagtatcaggcttataatggaacctcaaattttagttgaatctaaagggataacaaatttagttgactatatgcttttaaaacgttattttaaaatatagtttatttgcttacaataccttgactgctaggcactacaaaagcaaagggctttggttgtttgatacagaacctatccataaaagtagcctgtttttcctttgggcgatacattcaatctgacttgattaaagggttcccattaacctggcccaaaagccccttttctgaagataggcgctaaaccaatgggaacctttcctatttaaagaaacccctttatatttaaaggtgagagaagaccaatttttaaaaatgggtaattagtgttgccttagttcattttctgttgcttgtaagagactacctgaaactgggcaatttataagaaacaaagtttgtttcttatacttctgaagtctgagaagtccaaagtcatggagccgcatctgttgagggtattcttgctgctgtggactttctgcagggcaccgtggcagcagagaacatcacacatcaaaggggctgagtgtggtagttcaggttcctctttctcttcttataaagccgccagttctactcccattataatccattaatcaattaatccatcaatgaattaatccaatcatgagggcagagcattcatgaaccaatcaccttttggttcctggtgccatactggggattaaatttcaaaatgaattttggaggggacaaatattcaaaccatagcaaatgtaattaaatttcagtaactggtacattctgaaggatttttcaacatttatgttgacattactgtgtatttactctttgaaactaacatcttttatcatctatcttctctcactatgtgtagatttcctttaacatcctacctttaagcctctcacatctcaaaatgtttccataatacatagtacaactctcctaaaatttattaacatctttgtttacatcacttgaatttttatggcttggaaaaaaataagattctaaaactggcatttcctcttacagaaaatttgtttctctcatagtaataggggctatgaagttagagacagcagacaaatgttttgttgtcaagtcttagggtaatggagcttttatggagctgaggctgactgaaacagctgctaatttagagtgttatggagcttacttctttttctcctcaacactctttgtctactgagtgctgggactatagtaatttgagaagagagatgatggttgtgatattgggaaaggtggtgcaattaggaatggggctccagtgcaagggaacgagataagaaatgtgacccaggattaccttgagcacaaagagcacatgaggatcaattctaccaaccccagtgccattcaaggatttttacttatattatctgagactaggcaaataaatgcatatgttcattccaatccccaggaggtttctgaaactttcttagagatagaatgcccacagataagagttgtgcattctgatttgagatccataccctacctatttctctttataagaagattctttctaatgagcatttagaaaacaggcttggagaaggagaggaaagccagattggaaataggtagtaataacaggcagtaatagatatttctcaaacttgggtctatggaccacatgctcagaatgaactagtgtgcttgctcaaaatgaaaattataaaagtctcattctagatgcactgcacacagttggcggtggaggaggggggcaaatatgttcacacatagaaatctgaactttaataatctctaaaaaacaataaaattaagagtaacactaaattaagtgtagaggtgatgggaggaaaggacaaaggtcttttgagcttgagataatctgaaaaatttggcagaatgaatttcatacacatattccaggtttgcacattttgtatttttgcacatattctggaaagggagaaagttccagtatattctataaaaagggggtaatttttaaagtaagttaaaacacatgcttaagtttaaatgctccctgtttggtgaaagagattttctgataaatctgagattaggtcagttttcagctcactcttgtaagtgtctgagtgcgtgtgtgctaaagctggagggagggaagagaagatatgatattcatcaaaagctggctgttttctcaccatgtcagagtgctccgccactgctatttataaggaagagctggggatgctacaccaaatgacagtcgtgtaaacaaacttttagggattgagagctcttcccttcttcttttttaagccacaggaatttatgcgtatgtgcgtctaaccccaagagtgttggcgggaacctagccctcaaagtgatcacttgaatttgcagcccagcctccaaaactggaaacatgaagaaggaatattgacgagattctatagtttcctcaggaaccatcttttgaactcaaagagttctttaatgtcttatggtttattgagaaaaaagtcctctattgtgagaaattctttccttcagctgtggagattatttgagtttcagttcctgtagatgaccttttctcagacgagtgaactgggactacagtcaaagctgtgactctgtccaccttgggtgtttcatgagtatacaaattataggctcatgtctatgtaagtgacatttctttatacctacaaaatacacataataccagattcatattccatataattcatggaatatctcctgtaaagtcataggaaacatgaatatgaaaatattaataaagaattgaccacatgggctggaagcagtggcccatacctgtaatctcaacactttggaagaccaaagcaggaggattgcttcagcccaggaatttgagatcagtctggacaacataaggagacctcatctctacaaaaaataaaaaaaaattagccaatcatgatggtgcttgctggtagtcctagctactcgagagtctgaggcgggaggatccctttcacttaggatgaggctgcagtgagccctgatggtgccactgaaccctagcctgggcaagagtgagaccctgtctcaaaaaaacaaaacaacaaaaaaattgacagcacaatacacactgacgcatttttcttctgtacagatttttaaaaatattttttcttcatatcaaaggcttcaaagtcatttaataagcttgacctatagtttcagctgaatttagcagtatgtaaccactgacaatggccataactaattagtctgagatgattattgtactgaacaacctaaagtagtgtggttgggtttttcacagtcccaaaagacttcatggaggtgtggaggtttgaaattatttgttgtatgcggtgctatgttgtatgaggcacttagccaaagacatctttttcctaatgttttgtgctccaaagaaggcatcaaattattattaaagaatctgaattgcatacttccaattttactcattgaaaaatgccatccatcaattgtcttattatatattttcccctattagtgactatgattatagatagaatagaaatatattgcctcagtcctagaccatcctaccctctcatgtccttattagtgactggcactctgattgaattagtaaaattttaaattagtaacattgacattttgtgaagaagcagactggggactagaaagggaaaaattagaatttggaataggttgttattaaagtcatatttttatagtttgttacattaactataaaaaaatccttgtttccctatgttgatcttgggcaaggttttgaggcaattcagttttaatcaacatatgtgttctttatgtgccactgtgttttttttaaattactttgtgtattagcacattacatttaaaaaacagatagacttaaaaaaaaaaaaacagcatacaaaattttcttaggcagcattgaatgattaatgcaaactgggtgaatggtcttaactactgatatctagctcctggttttagatattgtttcagttctgtttttagaataggagaaaataataataactaatgatattgaatgcttaggcctatgtactttatatgtacactcacttaatgctcaaaacaatcctagagtgtggatactaggttatcctattgtactgatgggaaaatttgaagctactgagaagccgagtaacttcactgagtagttaataattgatgagactaggatttgaacccaggtagtatggcttcagttcctgtgcacttaatcactaagctattgtgccctttgataagatgcaactagtctaatttgaaatccttcaattagacagaggcaaattagtcactatgctacatcagcaaattaaactttatagctagaggaaacttccatagagtattctgtgctttcttgacaaagtttgcctacataaagaacaaaaaaagatctcttcttgccatctacaaatgtttacctgcagttaaaaaagtctggctcctgaccacttttattttgaaactcctgatggctaaaaaagaaacagatgaaaaaaatggatttttttcagtagttacttttcaaaggatgataaatggaaacatttaaaaaatacttttatagtgtgaattcattttctatcagatctttcagtttgaaatttcttttgttatttgtttaatatcaaagatttttaaccttctcacatatgaggaacactatttattttattttcttgcagtttgagaaatatttgtcttgatgccaaactgcctgaagacatactcttttacaaagaaagcaaaattttaagagaagttaacttagggttgctgacatttattttcttctttatttaatcttcccatagttcccaagttcagaacttgaaatattatctttattaaagaaagtattcatattaaactcccacatctatatgtagccatttttaagtctaaagtataaattaaaaattatccagacactatcaaataaaatccccatcttagcaaatgcttttcccaatgaatttcaaccaaactaacctagaatcagcttttggcgaaccttgtactaatggaagatttgcttttttgcttttgaaggcaaattgatattcacaaatcatatgtcacaagccactaaaagtgtcagaatcccacagcaggcccttggtagcttgttaatctctcctgtttaaaggaaacagactaattcacttaaatataatgaaagccatgcctgccccagcttagtcccttaaagcgtcagcccatacaagtcctgccttctttcttcacctccttctttcctggctctgacaattaaacatgaaactaagaagcaatgctttccttaatgttgccatgtctgagttatttcagatgtcacatatgtgaaaattgtgaaaatgcaggatgcctttaaaaaaaattttcattgacaatatatgcaagggggtatccttgcccacctttcaccattgttctcaacaaagcataaaagataaatcaggatgttaaatgcagggaccagatgtatatataaccttttgccctcattattctaattggtttccattaggaggagggagggaaaagtaaaacagcaaaaaaaaaaaaaaaaaaaaaaaaggaaataattgatatagaggtgagagagtgaacttttaacattggattggctaaaatctgggaatattataatcagaataatagaagagcaatttcaaaagatcaaatcaaaggtgattcatataacaccaataaatggggaggaaataatttatcttaattttatgcgcccagaaatttttcaactgtggtcagtggtgccccaactatattatttttaacacttctcatatttacatgtatttttgtactttgaaggaagagccaaatgttctctgactcttattgcccagatacacacaatcacatttgtggctaactatatttgtatttagttctcccccttctaaccatgtgcattttccccttttagtagcattagctatttgtggttctccacactgaaatgaactgtaatatgcagtaaggttagatcttccaatcaaggacttcagtggcaaaggacctgagactgggatgacaacagagtcttactttcaacctaagtcttaatcaaagcgtagagtcataagattgaaaatctggagttagggcatgtaggggaaaaaaccattttcattgcaagcatactgtacatgttagtcatggctcagactgcaataggaattttatggagcaagaaaggggaggtgcaagaagaaggttttgagtttcctactaaatttatttttaaatagcattacagcatcaggatttataaagaaagaagcaataacaaaaaggagctttttacctctctctttttttttttttttttgcaaattatttgaggatgaaattgaccaccagaaaagagacatgaggagaccaaaaggagctgactgattaaagagtgagctcctgaatgtggcaaagtctggaatcctacaagacaacctaccaaagcctgttgacagctcatcttggggtataaagtctgagtggaggtcttaggtatggaaggagctttcagaggtcatttaggtcacttcaatctctctccacaaatcacactctttgttattttagacagctcccaaccatgccgacattttacagtaataactataattggaaacttgacagtatccattaatttccaattctagtgtttggctatacctatttttatctatatattttttaactcatatctcttattctctcattttagctcattttgccttggtttctcctcagtaagcatgagaagtaattgggtttaaataacttacttaaaatctttacatattctatgtgaaaaccacctacacagataatattatcagatttctatcttggtttccttaaactcaaaggattcacactgtgtttcaattcattttgatactttatttggtttacaggatcattttacatgtatgatgttatttagttttcaccataacgccatcaattaggtagcatatgtggtagtatcttcattatgtatgtgagaaacctcatcatatttcacttaaactagaattctctttctttgatttctaatcagtaatctttccactgcactatcatattaatcttaaataaagatttgttagccacagcactatttcgaaccaggtaattctttgtggtaggagcctgccctgggttttgtagcacatctagcagcatccctggtctccacctactgaatgccagtaacacctccctcccagttgtgacagtcaaaaactgttgtaggctgaggaattgaaaatctgactatatttggagaataattgcattcaattaatattgagtgtcatgagattctctaaatataagatgtgcatcttcctgttaatatacataagattgctgagttatcatttttttgattatgacaatgcctgtcacctcacagaggatatcatccaatacgttttcttaatacgtctaagggctttggttctccatcaaaaagtaattttccacttttgctttaaaaagagtcacagtaagaaatgctatttctttttttcttagaaatttaattttcaaaagaagaaaatgtaactcagatgggttttgaaagtctcagccacctcagccttggtggatagccaggatctcagccctggtgttttctttctttttttatggtggtccctgaggttgtgagtgtctgaaatatatagtgaattctacaatgcaattcaaatataaggaagtcttgtttattaccaggtgcaaacttgttgcttcattaccatgtgaaccagggctatcttatttgtgtaactgaggttataggagagatatcaactatgaaggaaaatgtatgtggagaccaaaagtgtatatgaaataatgaataatttcacgtgaatatgtagttagtgattgcccaccttctaagttaaaaatagatttcttaatgacataggacaaataccaggttgctgaaagttacttcttccatattgtaaagaggctgtttcaatgaagaaagatattatcaatgaccttattggaaagtcacatttaaggtgggtgaatccttcatgctctatttttgcccttcaacaaacatatcttttttggtgcttcttgagtgtataagacatttcatgggaagtttcaaactctgtgaaatttgcttgtacaaataacagaaaatttagagcataaagctttgaaatgtctttaaattttccaatctatgttttgaaaattactgttgagttcaagaatgcctaatggctgagtcctgttgcttcactgtaagtataattgtatttccttatgaaggttaaaattcccatttcatttcttccatttatctaagtttccaggtgtcattcacaattagccattaaaaatgattgtgtttaattgagatttaccagtggctttaatacaagttttcacttaaagagcaattatgttttatattgcaagttgaaaactgtattaacggtgaattcagtgaaggaaatttagaggtctgaggctaatgaaaactttttaatgacatgcaatacctaggaaatcatattcatctgttgtttttcacaaaaactaactccaggaaaattgatattgttgtagaatattggaaaagttacagaggacactatttagaagtacattcattattcaacaactactttcagtacttactacatgccaggccccgtgaaatattttggggacaacataattaataattgctgtctcccactaaaaccagagacagacgcataaacacataatcatacagtacagtaagtgctggaataacagggcagtggaggcacaaaaagagaggggaagagataaccctgcctaggtctgagtgtttggggtaggaacactcagagctgaatagtgtcaattcaaatttctccaagaggaaatttctttagcagagggtaaaggatatataggatatctccaagacattagggacattttgagtagaggagggaagcagcatctataagggcagataaaattacaacaatttgtcatgctgagggagtatttgttctctaacatatagtatccattgatactctatgatatctctatatgggataagaggacaaaaggaatacaggactagctcctgtgaataacactagtgttgtcaaatatgaggaaatatagtaagttgctttgtgctgtttgctgggttataggagttctccctatgtcctagctaattttatcaaaaattgtaacattacagtgagtgctagaataacagggcagcagaggtacaaaaaaagagagaagagttaaccctgcctaggtctgagtgtttggagcaagaatactaggaaaggaatggtgtcaattcaagtttcaagaaggaatctctttagcaaaggataaaagatatatggactatctccaagacattggggacattgtgaatagaggacggaaagtagcacacatcatggagcagatgatgttattttcatttttcagaagaattaaggagtaactagtccaagttcacaaagatggtaaatagcagagccatgatgccaagctaggtctgcttgactccgattttcatgaaatatcatctctcttctatgtgttttatctggtttggcatggctttttagagagtatagtctcttcaagggatcttcagggaatagaagcaggaggcataaagacatgagatttgtttgggaaaaataaatacagatcacctttctggtaaagggagcagttgagagagtgataggaggtgactttgtgtccatatggatttgagaaagagaccttttgcagatgcagacgaaaggaaatgagaatggtatataggtgcttaggaagtagagactacaaaactgctgaataggcaaaccaaaatcagggaaaattttcaagcaaacttacagaaaatagcaaatgcagatttattaagtgaaatataataatgagtttgtaaggcataaagaatctgtagaagcccaatgtttccaaatcttgccagactatgcaagacagacttctctctcctccctggctcagctcctaaacagagctattatctgcagagataattccagatgctctgaccccttccaaattcttatttgatgatcagtcatctggagtggaactcttactccccattgaggtttcagagtgatgcaccaaactttgctctcctaattaacactgtgggtcatccccatgcacccagtagttcttagagactggactgtcaggctctcatatctatgacattgcctctagggaggagaaggatgggtggaccccttgagtggccttcaaatgcctcagcattaaaatagaaagctctcatgagtgcctgaaaaatctcagctgttatttctccagcttaaaaatgtttgaactcagaaagcaataaactacaagctaagaagacccaaggagcttctgtggggcagcagaagctgcttttagctgaactagcaaaccctctgattgtcatcattccagtcaagatttcagcactgaagaataaccttgagagttgctgctgcaaggcaactcttatcatataaaatgtttactattccttttaagtatacagagtaccttttaacaaagacatttctgggaactttggtttgaattctttattgggtcaatgagataacaaggatgacattcattcagaaaagttagaagttgaagttaggaaaattagagaatttacctatgctttctgcagcagcaggcctctttaaaagatccaaattttgaaatatcattaggacagaatatttggtcgataaagtagtcaggccattaatattctttcacaattattcacttggtgattgtgttgctacaggtgacttgcttctttttagtgatagtgttaatgattgtcatcatgccttgcaaatattaattacatccttgcaggcatcatataaagagacattaagatttcagctcccatgctttaaagtcttgcaattaaatttagaaaacaagacagctagtattctgataagtacctataaaaattcctaattgttgatgcaaaagaaatgacatataaaattaatacagaggtaggtatgagaagccatgaggtagacaagaggtattctttgaaggaagcctgtagtctagagaagtggctgcagggaattcaaagtgatggccttgacttaaattacaaatgttgctgttctgttcagggatcaaggatcagatgcttatggttgaatgaatgattgccctagggaagggagtgttaaagattagcagggaaaactaaatgggcatatcaaaagccatcagaagatatcaaatgtcaggataagtaggaaaactcattaacacattaaatgttttgccctttaaaactacttttcttgatggagtatattttaaacaattaagtgaaacctgttttaattaaagattcttctgatgtgattaagctgtcattttacagtggcatgatgaattgtaacacttggacttcaaaattctccaagtgcattttggcaaaagctattccatgaagtcataatctgtcgtcaagaaccaaagcattgaatgaatactggtcaatgcaaatttgtttctgtttttcagtgctgtcaggatggggatgatttgaagggcaactcttagggttcttaaaaggatataggtattccaaggtgattcagttcaggaaggtggcattttctaaacaatcacaggactaaccctggatcacatattttcaagatggaattagattttctagtccagtagaaagtagaatgatagaccatgagacttggaagggttagggggtgaaagttggagtggatgatgagaaattacataatgggtatgatgtatgttattcagatgataggtaccatcaaagccctcacttgaccattacacatgtaacaaaattccacttgtatcccataaatttatatgaatttttcaaaaagagattttccagtccagtaaggtccctacagtaagccactgaagaaagtggcattatcaccattttataatgaggaaaaataagattttgagacattaagccaatttactgaagttaccccactaataatttaacactttagcccagtctattagactgaaaagtccactgtacaacaccctccctcagattcaatctgcaggattggtctagaaaagatttatctaattcacattttccttcttccaggtaatgtggaagtttttgagattcagtgattttcctggaatgctatgcaatgacaaatgtcaggaagagtaattaagaattgatttccctgtaggattcagaatatcatatgtcattatctttgaatatgcatgtgatttttgcaatgctatcccattccctgtgtgccaatataactttttcttccaaaatcttttatgcaaaaatatgcaagttaatagcattacctagtagcaatcctcaaaactttactggcacataaattaaatataagcactctccaaaggtgcttagatggtgcaaaagaagtacaagatgataatttgactttgctgacttcagatcttgttaggaggctctcattggggtataacactgcacataatcaactgctaaaaggcttgagccattgtgtatgccaaggataagcgtatatgtattgcatcacatagagaacaaatgtaccacaaaagcagagggtctttattggagaatgttattctgagatttttattttaggagggtaatcctattaattatctaatttccatttttctcttggcttctaaagtagatgtatcaattttagatacaatgtactgactttttatgttgtcatgagtagagcatgtaccactaaaactgatgtgcggagataatatgcaccacatggtttcttactgtctatatgtctggctttaatcacagattcttcatgaaatgttgcaagcctggggtgagctagctgttagattcttctggggtacagcctgggctgtggattattggtgaaactgcattacgaggctactggggttaattatgtctgaaagttttcagtacaatccacatcagttgacactctgtgcatactacataaacagtctggagggagacctttattagcagagcaagaaagcagctagctgtctgtgttctataatgtcctttgttttttagagcttctgactcatgtagcccttctgttttatttaatgtattcttaatcaaatatgtgcttattaagccaaataatgaagagtcaagaggttcaaatcttgaacataaattccctatgtctaagaacaattcttaatttaagattatgtgccccaggacagcagcccactgaatctgggggaaagcatgccaatgtttacccagaatttcaacatacattgtggcactggaagccatcctaacctgcagaagtgctatgaagaaattagccaatgaacatacgttaaagatcttctcccttgtgtatgtcgtatcttatctgttggaacttctgccatgtagaatcttcctaattgtcaattaaccataatgttcttatgtataatattctttctgttcctaaacaaaagtagggtggaagaacattagtctaagctaatccagaaatgcccttgcccccctcaagactcctgactttaaagtcactcagcctcttgggtacacgatttctactttacctggcacgaactctgcatcatcttataatgtggtgggtttggtaagttctggaggagacagaggggaatgcattattccaacaggtcttcctaagaaccttcatggcagaaaagactaggaagcttgagggtcctgatggccttttaagtgaaaaagcacttatttggctatacttagctataaggagaaatctgtattcaccaagatgttgaaaagcaggagaattttgcccccaattggcatctttgtctctaaactacctaagcacctcacaaagagaggcaaaatagcataatggttaagagcaaggacactggatcagatgctgagtttgaatcctggcttcaccacttaagaggtatgtgaccgtagacaagttattgagcctcatgtgcctattacctctcagtaaaatgtaaaacagggatactaattgtacctcactcaaggctatcatgatggttaaattacttgatatttgtcacttggtaagtgttaaacagtttcaactgtgaattctcaattccatccatttctctgatagaaagttcattattagtcatttatgtatagatcaacttttatatctataaactaataagaaaaaaacctgacaaaactacaagataacttcttgctcttagcccaacactgggaagctgtgactttgtgcaaaaacatgatctttcagggtttaagattcctcctctgtaaaagaaaggttgaagtagatcactggtatggcccctttctggtctaacattaagtttttccaactttagggttttgttgttgctaaacaaaaataactcatcatgtttcgaaattacattagaatgttgtttttttttatgaaaatcttaggaaattggaggtagtgtcggtgatctaaatggcatctcttacctacacatacatattttttttgtaataatctttttttcaaacagttttggcagttgaagcagaaagaagtgaaacattagatttttgaaagccaagtgtactgggggaaagggatgtaaggtcacctggttagtttgaagtgtgtaattcttttctctctcacctcattctggcttcttcagaatggcagttgggtaatactgcatcagtttgataaggctgccttgcccttcctaacaactaaaaccatcctagacaccttttcatggacactccctccattaaagcaccagaactttagaactgcttttaaaaatagcagataaattaatgatgttcttgagtaacacttttcactagaagagtctgactgagaaacaaagttgataatgctgtacaatattcttatattgaataaaggcgtggagtctttctgccttgagaaacatagtcagaaaatagccctgggacaccgatattagaaaaggaacagacacaaactccattgcatttggctgccagtaaagagctcattttgtttacattattactctccaaagaagacaagatgaaattgtcattatccaaatgttgtctagtgttttccaactaagttcctgagctaaagtaagagattgccaaaaaccatgtttacaacactgaatgcattgtgtaataaagtgttaggtagatcagctaataaaattacttattttagacttagataagttgaatttaggtttaattcactacccaatggggacaaagtgagttggttttctgataaactgaaacatacccaactttttgttgataacagagtgtaagagcctttagatattacccacgggaaccactccctttcagtgggaaaagcctgccattctcaactgaattgctaatggtcatctatttaattgattttgattctcaaatttgttaaaatgcagttggcaaagaatattttttattgcccctgttggctgacctatggactatgagctggaatagagttggtgaaagtttaggaatggagctggaattaaatgcttagattcccatcatttatttcctaagggaaattgtaacaatttcacctcgctctttttcctgacactaagaattgtatgaccaacactctcttgttaaagtattagtggatcaagtcttttgggaaaagctgcaatgtactttgaacatttgacccacagtaccacttaggataatttatctgaatttattttatttataagatgcagaataggaaactgaatcatgacgctttaaatataaatacactctgttctcagcatattcctgcagagtcatatgaaagaggtcctctcttccacgctgcattgtattttacttttatcattttagttttgtttaagtattgcggaaaaatatggaccattatattctccctgtttttattttaccttctgtgcactaacaattagtcttcctttgttttgcactatgagtctgaaacgtttgttagttctctgctttcttagtaaatggtaccatttaaaatagattgtaaatatatattgcatagatatttaaatatatattataaatacatagaaatatatatgcatactcagagtcctctataagctctctgttctacttgagacttttcatatcagatccttatactgttttctctttgtgtttgatctgttcttttatcatgtctacaacaaagatgtttaacctatgtacaaagggaatataatttgactttatataccgccttttgaagatcatttttaatactagtttgaagccacgtacatcagagtggtttggtaagatgagattttacacgtcttgaaaagtccaggagagaatggttatacttggtgaatcaaattgtcttctttcctaccccatttttccaactctaaatacaagtgaaatgaatgttcttgtaaattgtactttctttttatggcttttagaccatagttctatacactatgtgcacacataatttagagactaggtacatgcgaagagaataaagtcactgccttttaaagctctgtgtttacatcaacactgtctagctagatagcctgatgaatgaaaaagggaactggtattataatggtagttaattaagacagctaataaaaccaagatctgatcgaagctgcatctgggagtgaggttttaagaagcaggcaggactgtgcactaattgttggattgttattatattacatgtgtcttggagaggagatagtgtgactcagggtaggcagcagctgaatcagtagcactgggttttatccatcacaaatttagtattaaaacttcagctgtgttataactttcctaatggagcaaattccaacacatgacttgctgcaacagccaaacacacctaccactgcttttagagattttaaccctggtatgaggacaggttctatttggatactttctgagcaggatagaaagtttacttacatctgcgcggtgatgcttatggttctgctgtaacaatgaacaaaattagtgtctctgaagattttcagatgcaattagatgtaagagtaagttgattatttgacctaaaaaagcccacataactgtcctttagtatgagatagttgtagagacagggaagatataacagagtattaactataatatactactgattatattattttaatgatttaataagcacttttaattaaaaatatgccttcctcttagtccatgtgagaaatgccattaattataatattaaggcaacatatatgctagacaaaagcattttagtaagaacacatgagtgttcaacatgccatccactctctactttctatttaagagttttacttacaaaggtgttactagagatgcaacttaaggatctagtatattctttgttaaggagtctgtttgtattctcttaagaaaagggaacattttaatattcaaaggcaaggtagatccatcatattttaattcacctaaactaagaactccagagagagttatagcttattattcactatcttactctatctttatattattacttggttgtattgctaccaatatgaaagaaaaaaatagaggaaaaaatcctcaaattacttatgacataataggtgcactttttgcaaatttattttatttcagaaatggaagtatgttagctggctggataaaccggaactactctttcaagtctggctgtattctagcagagaaaagaagagcccccgccccccagcttttttcatattaaattattgagttttctcttcccattgatggcttagtagatagttcacttaatcttaaagcaaatagggagagatggtggaacttctaccactttccttacttaccagctatttttgctgaggaaaaagtttctagatacattctaattttgttaagagaatcttttaaattagaaggtacctgagctctcataatatttgaaatgtaccctcaggatttactttttaaaatttattatttctacataattaccaaggggcttgacgcaatttaaaaatacaaacacaaaacaaaactaatgaagtgagaaaatgagaataaaagctaaataatgagggtttagttacaacagttttattggaaactgtactggagattgctataaatcataacatttagctccaagcttattgaaatgtaaagaaaaaagaaaacgcagaacaaaccatatagttctcaacaaaaaaacaaagcacagcaagcaaagcatgaaaactaacaacaacaataacaaacaggtcatttagacgataaacaaatatatcctggcactggattcttacatggatattgaagagggactatggactatgcattgggaatctaatattaactaagaagaaagtgttcacaagacactgttctaggaaatttacctgcataatctcattcataatcatcataagatcgctatgaaatcagttgcgtctctgtaataaaaatgagaacacagagactatttggtttcattgcacctacagatggcattgtgtcatactaagaaatcttttttaaattacaaaacattttctctaagaacgtatctcaacaattcttgtgagaagcctagcatataatattaggaagactgaaagtttttatttttaatagtgtcaaaaacaacttctgttagcatttattgaggacatattataattaactcgttcaaatctcagaaaaatccttctgttaggtacaaataatattttattgatgaggaaaaagagtcacagagggaatcctgggagcactttcaaataccgtaatgagagcttctcaggtatcttctaaattgaaaggttctcttggtagaatcaaatgtacctggaaaatgttttctcagcataagaagcctgggtaaacataattatagaacttagacatttccccaggagaatgtccaaatcatgtactcctgccaatctaaactagcacaggggtgggttttaagatactttcatagatgtttttgagctttagactgttgatctcaaaaattagctgtctcaatcagagttatgtcagcagctgagtaggagtcaggtggagttcccgaaatgcacagtggatattttgttcctaaaatgtaagagctaggcttgtaccctggccctggtaagggtcatgctacctctgtattggtgtccccttttagaggtatgaagggccaggcatgagttccctctgtggcagcttttgcattgtgtacaagcaactctttgactaaaccattgaaatctactgtcagagcacaagatttcagtcaaagaattgcatcgaaagtccctcaaatcctcaccctgctaacggtgtaagtggcatggcgttatctttatcagtcccaatgttgtgcccagtgctgaatgatggtcacccatgcagtgcatccccaaatgtgctcctctttcatggactatgcttctaattaatttttggccctacttagtctgagatggaatcactgataatggcataactgattgattctataaatatttattagtttcttttactactgagttagtagtattaaaattagtagtagtagtattagtagtattagaatttcacacttggaaaatccagaccttaaacgtaaaaatcaagatataaatcagtaaatatttaactctagatgtgtgtgcacgtgtgtgtgtaatttaaaaaaggaatgtaactgttgtttatcttttggcaaaaattattacactgaatcataaactattgactccatctctccaaatttatcctgcaagaatggaaattcatagggttcaaactaataatggtagtaaaatattaatagaaatgttagtatagaaagtagtcacaggtaatctggaagtcttcttccttacagataagattccaacgatgggactgacttggaaagcattgatttctggttttcagaggaaaagtttacagagtagcatgtttctttgtttaattaaacggtatttttgatctaacatttaactttagttttacttatagttctcaaatcgtcagagatatttctatttttaaatctttggaaaaccactgaactgttaaaaaaagattctatcaaatgggataaatcagagaaggtgacatctgttattgatataggacatctcaatataatctctaattatcaaaaatatgagaatgaactgctgactcattttgccaattatgtgtctatctatcttattatctgtttattgttgggtgagaaatcaaaccacttatttatataagaaaattgacacatactgtcatgtgtttaaagcatgtcttttgtatctgattagtgtattttgaatgagataaataagaaattctgccatagattagcatcttcttcctaaagaaaaaggataagagaataagagtatttttagacacaataaaattcaaattttaatgcgggctaaacttaattagctcacttttcttcatttaacaatgccagagtaagcagtcttacccaagaaggttaattttaattaatagatatttacctactttaagtacttttaaaattcttagccatgtgaaatataataattatcagcgggcattatttactaagctaccaaatgatacaaataaaaacaagttttctgaacttggaaactttcaacctggaagttaccaaaatcacattcttttaaagaaataaccaaagtgctatctaatacatggaacaaaaccaagaatgagccatagtaatttaataatctctttgctaaacctagatactgattttttttttcatgaaatgaatgatggatagaataaaacatttttatttaaaaaaattttatacatcattttaaattggatacatttctttaaaataatacacagcaataatatataaaacttaagaacatatatgtatattatatatatacacacacctatgtgttgtatgtatgtatatgttatgcatacatatgtttatacatgtaaacattacttttttattgctaatagtattgcatgcccattgttagaaatatgtagataaagaggtattaaaatagctactcataattctactacctagaagtacctgttgttctattttggtgaatttctttttatttttttccctgtatctatgattatataattacacattaaatggataatctgaggagacatcatactgtatacagtacattttatcctgggtttaggcttttctcatggatactttttcatatcattaaaatattcatatgtattagtttaagattcttatattctgacttctagttatatcttagtttacttaaccatttatgtatataatagataatatacatttattatatatatttagaagagatacatatcaatagttaaaatattcacaataatcctgtttgatattcttattatctcagtttttgacgtggacaatttcaactctagatgtgtatgtgtgtgtgcgtgtgtgtgtgtgtttgtttaattttaaaaaaggaatgaacctgttgttcatcttttgtcataaattattacactgagccatacactattgagtatacttttccaaatatattctagaaaaatagacactcacatgattcaatacagtacatccaaataacaaactactaaacaaatgagacttagacttttcataactttagatggcaaaactaggatttgaacccaggtctgtaggaatccaaagactatgaccttaactactcaactttattactttcaaatacttgtctagaagccaactgtttaggtctaagagtattcaaaatttttaagttattgatagatattcccaaagagtttttttagttttctatgaatatatttagccttagcaaaagtagaatatcaagctattttcaaaatgaagtatgagtcaaactgatatgtcatgtacactttggccatatctaacttagtgatttcaaaataagagactaaagcctagcagagcaaataaaatggcatatatagagatatatacacacacacatatatatatattctgatatatatatatattctgatatatatatatatatatatatatatatatatatatatatatatataaagaaaatgctttcccattttcttaggcaagaattatcattgttaaaagtattaagaccacaaagaccttaatttgtaaagtggtggtaaaaaaaagatagctaaattgctttccatatgaatttaataattatctggctgctggggtaagcagcaagacagatgagatggctgaagaaataggaggtgaaacaaaacagaatgaggcaaaagattatagagacaagtgcctatgagaaatttgctcaaagtagaaagtgggagaggggcagagaatgtaaccaaagtatcctagaaaataaacacaactttaatttaatcttaaattatttaagctggacagatctatagtctctttttagctgcaaatgttaagcaaagtctgctgtgttcataaatttcttgaacgagttttggaaggaaacattaaagaagagaaaccctggttcaccatgcaactagtgcagagcataaggaagaagagtcatagaaaatgaaatcagaattgtagtggacacataagattgagcatttagggtaagccagaatttagaatcagaggtgatgaggggaaacataagtcaccacttcccagaattctccccatgtagagctgccagataaaaattaaatatggatttctattaaatggcttccaattaaatatggacttcagataaataacagattctttttataaatatgtccaaaatattgcatgtaatataaatacacgtaaaataaaaagccattcgttatatatcttaaattcaaatttaattgggaattctgtatttttatttgctaagtctaggaacctgctcctaagaacctctagagataatgggaaggctggaagttccaccttatctgggatgggagtgatagaaacttgcactgaactttctttacaactcagaaggtctggtgaacacaaatatgcacaattagtgtcaaaatgattataaaatccagatcccatgttaagtgccctttcttctgtccctagttctgttttcagaactaggtgagactactccattagtaagttgtgttactatggcaaggaagtatggcaagactatcccattagtaagttttattagtgttaactttgtttaatacttatggaatatttcatcctactattgccagtggtttcacaaaagcaaattatatttttaataactcactgttaacccacctttatatgcacaacttttcagaacatatgagacatttcttttaaaaaaaagttgcaagtctacttgtgccttattaactacttcattcatggtatagagagatggcaggtagaatcctcaggagcttctgttaaccatccacatattgtcaaacatttttgcccagacacattctatttacattttatagcaaatcgtggcagtcttaggaaaagacatattccagagggattgtgtgtaagactcctatactgaccttctaaattaaataaaaatatagcatgttcccaacataaagaaaatcatattatagacactaaaaacagttgttctatataagacaaatggtaaaaaagaaaataatagtttttctataggaacaataaaaaccttgagacagagccattgggtcccctccaccagcacaatggaatcctactataagggcatgagatgagtttaattagcaagtattgattgagcacttattttgtgctatagctagaccttttgctctgtgctaaaattgcaaagtaggtcagtccatgctgtcctgtatgatttattcatgtggcaatcaatatttgggcaaagtataaaaggtgccccccaaaaaagagtgattcttagcaagagaagaaagatttgccagggacgaagcatcacaaagaacagccctcagagtttttgaaggatggatatagttttgctaaacaaaaagaagttctattcatactgccctaagatgtgtgaaaaatggcaagtacatcaatattgcttgagtaaaatatgaggtgggcagagccagactaggcaaaagttaccatattataaagggttgctcgcatttcttcatgatggtgacataaaaaccaaagtgttttaggcaggagagtgtgacttgatcccatatgtaactcagagtgatcacttttgacagtgacgtgaaggagagagtcgagtgaggcaggagtcatcccaggaagcatagggaggacgcagttatactagtctgaaagggagatattatgactcatgcttaacttcatgagggatagattcatccattcattcaattatctatttttttctacaaatatttattgagtatttactatgttcttggccttcctctaggtactgattatatgaaagcaaaccaacaaagacatccccaccctcatggtggttatgctgtagagaacagaaataaatttttcaaaagcatattaattcattttttgaaatttataatttataattttattttttaagaaacaaaataagatgctgtgctagaactgcattattcaattcagtagtcactagccaagcatagctattttaatttaaattagttgacacagtaaaagaaaactaaataaaattattctgtttctcaatattattagtcatattttaaatgctcaacactcacatattggatagcataagttatcaaacatttctattattgcaaaaagttcaagatggagctactttgagaccgattatttgtatcagattatttacttatgaggcgatgtactgagacctgaatgacaaagtgtagagtaagctatacaaaaatcaaggaaataaagctcaggcagagtgcatgagttctgaagaatgaaatcaatgtgtgaaaaagaaagaaggccaagtgggctggagaatgttgtgtgaagtagagagtagtgggagaagtttggaaagtagatcctggtcatgtaggccatgctagaaaatctgacatttattctaactaagtagtgatgttatctccaaaattaattgacatgttaatttgggaagctagtgaatggattgatgtaagtgaaaaacatgatataattttatatttgttttttttaattcactttattttggggactgggaaaaatgaaggaaatatacaaatgagaaaaaaatgatggttttggatagcactgacagtggagctgtagagaagtgaaagagtcaagacattttggaggcagaacaagtaagtgttcatgtttgactgtaaatgggggtgggaggtacatagataagaggaaaagagtaagtggtgttgttttgtgctgagattaaggctgtgggacaaggaacagcttcaggaggacaaatcagttaattttggagataagatcactattagaatttcaagggcagccgttaagtgattagaggtttatgaggttagagaataggtcaaggctggagatgtatgtttgggcatcatcaacatatgtattgaatttaaagtcatgaaacagaagtgcctgtggaggcagcatagaacacttaggcctgagtccaacgtcaacccaatattttcatactgagtagagcaagagaagaaaacagaaaaatgacttagaagtactaaagggatgggagaaaaatcaagagagtgatatctcagaagatggatgagaaaactttccaagtatagaaggtcagctatgttgaatgccatgcaaggaggggtaagatgagaaaagacagttgaaattgagcagcattgttggtgcctgatgaaaggcaagtagaagttcgatttttttttttttttttgagctgagaaagggaatgaacagtgaaacaatggggaaaaactttctatttctgagaagggaagcaaagaaaaaaaaggagagaaattttgaggaaagcttgaggtcaaaataaggttgtttttgtgaagagatccccaagcatgttgcagagaatgatcctgtacattgtcagatattgatgatggtaatggtcattcactttggttaagatgaatggaagttcaataataatggaaaattgtaatgcattaatagtcttgtaaacagaaaatataaaacctagctgaagtattatattcttggttaaattctatttgttcagttttattttactgatttttttcctcaaggtatcttcaaatcaagtcttcccattttctcattctatattcattattttccagcagtatattgtttgttttggaatttgaagactatttttaaggtcaagatattttgcagactcccacatggggtcattatacctacattatgatgaaaagctagtgtggatgctttaaaataaattttattattttgtcactaaaaatatccaaatatatttgaaaatagtgtatatacataatatatgctgatttaagttacagacaatctctaatgtgactctcgattgtaataactaaagttttttaggcacccaaggccacagatgggtggtccctatcaacatgaaaagaagggagctaacaagtaattgtatatactgcttattgccttgaatcagggaaactacaaggaatatacaagtgctattatccaaattcgaaaagttattttttcaaatgaaatcctttgaaagttccaaaacttcctttcttttactgacccctagaaaccactgacccagtacatactataaaatcataacaatgctgaaacttagttattattagcaaatgttccacagaaaatcatcatgaaggaaaacttgtactctctcaatcctgagtattggaaatgcaaaatatttgaccctggaagcagaagtgggtcagagagttggtttaacacacacacacacacacacacacacacacacacacagagaaaacaaaacagtaaaaccctaattttggtaaaggaaaaaaaaaaggttaacttttgccccaactataactcatctcaaatctgatatttttactgtttgtttgaaattttgtaataaaaaaattcatttaatctttttaacaactttcaaatgacacatcttgtggtttttatagtaccctagtaacaaatacaattgcttaaaatgctattttcctaacagtttgtctttattcagacatggtattatcatctgcctgaatttatccccattcaagcatgaatccataaaattggactgtggcaatgggatgcattaaagtacttgggctggactagcagcttgcctcagacttggagctgacagcttttctgtgttttcagtctcacctgtctctctgttctctatggacgtctctttgcttgcactctgaccagatctctggccatccaacctggcttgttctgttggcccctatgtctggattcacatttgttcacctctagttctttaatcagagttgtgctttgatctgtctgcattcagcaagagcttttactttcctgggttgttaaaccatcattagcagtattttctcaacaccagtcattcacataccactactacaaatgttgccatatttgtcaggccctatcctattatttccttaattcttttcctgcaaattgactcactttgtatactaaaattaatgtatttttaaagacaaattattatatcactctaataaagggaaagccaatatctgttgccataaatagaaggtgatcacataattaaatataataaaaacaagataccatggttaaattgtggctatatgctatgttttggcaaaagaatctaagtctgaggcctcagatttcatttgttggaaagggagataagcaagttttccagaggtgttaaggacatattagtaataaactgagattttccttgacataaccagaagaactgaaaaacaggaagtgtttcattttatgatttaatgttatttcatactacttgtatgtgccacctcagaagcatctcatataccctcaacatagcatgaaacatctagaatgttatgtgtcccacattttagaagacagaattttaatgtaaaattagctatcagagagtttgtgctaaacatgaataaaactggataatacaatcaggtaatgcatgatcttcagtcgtatttcctatggttgagctataatattagcaataggctttaaggatctttagacttaagggatccaagataagttatgattgtaatgattctttgttttcttgtcatttgataagactttaggattcatagcatagatttcagtggggaataagtacttgtacctaacttgtacataaagtggaaatttaaattcaaaaaaattttttaagtagagcttttaaatgaaaaattatttttgtaaacaaaatgcctgtcatgaactataaactctagacgagttatttttatttgttcatgtaagggcaacacacacccacccacctctatttgaatctgcacccatctctggaaatgcttctttcctgaagttcggaactttgatggaatggtgaggaaattattatataactaatgagatcctaccaaactatgtgatgcatttggggaagaggattaatgctttggagctagtagacaatgcaataaaatctagagactcactttactccgctagaattggcttactgttctagattctgtttactcatgtaaaacagagagactgacatccccaaatttggagacatcatggatttcctttagacggcaacattctccaacttaaattactgaaatatctcaaagcaagcaacttattttttttaatgtagatgaactttagtgtgggcaaggtaacgaacttcctaaatattttcattccctttatgtaagggtactctgtcttcctcctgcctgtggtttactagagtgcttaacctatacgtggcaatcagtaaacacagcactttgaaaaatgaattctggttagtttttttttttttcctaaaactttctataaatttcttaatccaaaatccttgttcccttgaactccaattgaagttatttttgatacaatttattcagaaacttatatgttataaaagaatttgtgacatctatatctaatatttattaactttcacaaattgttttgtcctttgacagaatgtgcctaacacaatgtacactgaatttcaatgactgaagtaaaagtaaggtctagatgctggagtgtgacttctacttctttgtatcctatagttaataatacataagggctacttcataagtgtgcattgatttgtttgtgatactcatgaagatcaaatttaagactaaaataatataattttataaaggagacagctaattaaggaatacgtggtagcatggactgagaataaaaatttactaacttccagatagttttaaattcacaaatgttattgctagagtgaggttatcaagatatgcatacactctttttaaagaatattatagaaaagacaatattgctttcccctctctaccttcaatcatcaccaaatggtatttctgcaaagcatacaagattagttggaatttagaaataaaataaccactatttgttgaatactttccataccttaaataatgtattacttacataaattctatgaagtagggttgttcaatatcaatcaaaagagtataaggcagacctggttcagctctgtctgattttaaattctatgatgaacccactgtcccatgatttctccccagtcactttggatcttattcagaaatgtttctgttcttacatttaggtcctatagcagtgctgagcaaccataacagttccctagaggttttaggtcttcagataatgggtgttaaatctcctccaagattattacattacagtaagttggtctattatgtggacattatagagctttcattgctctgcttcaaagaatagactaaaataacttacctacttgaaaacactcatcaggtttatgttttttttttaataacaaggcagtgaattatggaaatagctcagactatctattatctatctgaatatataaaataataaaccatatcatatttcttcttcattgtattcagtaaaccagatacatgacctaatgaagtataacggagtggtgtagtttttttacattcttgctcctaagtattccctacaagtgaaattttaccaatttttatccaatgcagcattccttatgtataccacattttcaaaaagacatgttcaatgaatctgcataatatctgtaggaaagaagcaagcataatgttttccattgtaaaacattatgctataatagttattagattaacaagcatttactgccatttatttcacctagaactcatatgcaaacttttacgctagaactgagaaatcagatagactctagaaatgctaaaaaataagaacaaaggaagacttgattagaatatatttttctcatattaaatggaaagtatatttcaagtcatcatgtaaaccaatccttaacttgggggtggttctcatgttaatttctaaggtttatacatggacatggtttttctttctttctttcttttgttttgtctctccccttccaccttggattgattctttctttgactgtcaattcttttttcttttttttttttcttttgggcaaaggacaacacatacattcctaattctcttttcttctcaacatttctgagtttaccaaaggcggtagattttaaattcctagaaaaaaaggttagctgtgtatcaagaaagttattccaccagagtctaaattctcaaaagcattttctttcagaatttcatgttaagtaacactctgctgtcctaaagtgaaaaccaacaactatcaatcatttaagtcagtattgtcagaataatgaaaattaaaattatactgataaaagacaatacctgtagccatcacaacaaagaaacatttatctgtgtcctattattaaacacttcttttcatgctgcatataatgtcattgaactttcaaaattttattatatctcataatatttttctattaggttggtgctgtatcttttttaaaaagctaaagaaagtacaccaagaagctaaaatgttggcactttatggatacaagggtagatttcaaaggcttataaccctcactaaagtgtataacttttgggcaattcttgaagggacagggaaaggagtgttattcctattctttgggctactttcagttcattcacctcccaaattctgtgttgatgccaactcctgcttttcccctccactgctatttcagtctcatctgctcccgtcatttttatacactcctttcttctttaactccatttctccttaactgtccaaagtggtagatgtgtccgaaatggaaaatttcatggccactttggcttagtagtggcaagtggtcactgggacaaagatgaggctactttctaaagttcttcactcccagcctctcataaatcttgattatcttgatttcttaccgttttcctgtcctattaactaaccaaatagtggagaaagaaagttcaactcaagagaaatgagcaaagttctaccttaatttaaagtaatgtataagaatgatgcaagagatggacattgataggaacatgaaaagaatgggggcatatagcctgaagtgccagtcctttgtctgagataataaggactctgaaagaagggaagaatttaaccaaaagtgggaaggtgaggagctgaacagcacagaacagaaagcatgatattaaagataggggtcaaatggccagaggaaaccttgaagataagcagacatcattcaaagaattgcaaagtggaaaaagaagtggaaatttctcagtatgggcctcataggttactgtttcacaaatagagtgttgatagaaggttatcattgcattttagataatttgcaaatacgcaaggaaaattgtcttgctataccagaacaaagcccacttatataaagaaagctcttatccccaacagaacgccttatgctaaaagtttttttaatttgtggggtttttctcttgtcctcaactctaaatgtctttaatatactgtgagaacaattatcataatttctacattcaaaagttaaaagccaattaaattataatatgtgtaacattttttgagtagtgggttagtttatacttactggtactactgaactctaaaataatttaactattctggtcatatttgtacaacatttagaacctgagatgtaaagacttcaaataaaaataattaaataaagcttaaaatgttctttgtgtttggattttagtctctatttaaagacagattagatattttggaaattttcataaaataccctctttaaatcatattcattgtgtgctttgatcgcttttagaaaaaatagtaaaaggaaagaagctgtttaaaattaaatatagttggtcttaaatgaacaggaaatcagattcatggatttggctttacatgaccatttacccacattctaactgatgttcctaacatgccttaaattcattactaagtagctagttagacaatctcaatctagatacagtttgcttttctacattaattctctgttatcttcttacattcctcgctcaataacaataacatgtctcattcttttgactttgatacttaaaacagaacaaattaatcacaaacagctaatgaaaattaatagagtactttaactcagctgttggggaaattctgataaagttatagagaaacttaaattgtaattcaaatctggggagatacatttgttagaatttagccttttcataataaatgtttctttgaacttgtgttgtgatgagggaagacaagggaaaagctttgctgatcttttaaacacatcaaagccttaggaagctaaacatgctggacggatgcttttgtcaacctgaatagtatctgtgccgcatctttcaatgtagatatggcatttatctcctctaaatggcagaagacctccggtcactgcagggactctaaaccaggaggtctacacagagcttcataatttcttttggtatccctcaaatttgattattgtcatattttctgaaaatcaattttgtactctgaaaaacaagtactaaatactggttgtagaaaatacagaagagtacaaagaaaataaaaataaccaataatgtcatcacacagaagcaatcattattttagattatcttccttctttcagatatgtaaaaactatatgtgttatttaagataatatattaaatggtagcttttatagaattgtgagcataaaatatcaaatttaaagcttacattattagcaattcctcaactcattaatgctatttttaacctttttctaacatgttatatgattgttggtggaaacataataattacatgttagaataataatttatttaatacatacatttatttggacatttagattgttttcactttgtcatcattacacataataattgtaatatgcatttttttttctgagacagagtctcgctgtgtcgcccaggctggagtgcagtggcacaattcaactcactgcaacctccacctcccgggttcaagtgattctcctgcgtcagcctcccatgtagctgggactacaggcgcatgccactacgcctggctaattttttgtatttttagtagagacgggttttcactgtgttagccaggatggtctcgatctcctgacctcgtgatccacctgtctcagcctcccaaagtgctgggattacaggcgtgagccaccacgctgggccctaatatgctttttaatgtccaaatctgtttttggcatctctgaccattttattttctaatagtgcttcacgcatagaaaaatgttgatttaaagtacttttaattcaacaaactgaaataaaggttttcagtagattatttttgtgttttagctaggcagttctatcatcaaaaggtaatgatggtatggtttcctctttttaatacttatctttctaatttttgtttaatgttacattgcattaacctggactagtgagttaatgttaaatactagttgtgtcagtcggtgtagtttactaagagtgaacttcatttgaattcctgggatatgcctcaattgatcataatgagatcttctataatagactgtggaattcaattaattaatgttttatctaggattcaatagtatctttctttttgtgttatcttaatatttcagtatcagagttatgctacttttttgcaaaataaattgggatcactaatataacataagcttacctattttagaaaaaaaatgtaataacattcacaggtgaaaccactagatgttaaagcctatttttgggattaaaatttgttataatagtagtggcagaaatagtggtactctatcttatttaagatagcctctttctcagtttgagtcagctgtcagggaatataggatctaagaaaatttgaggctcatctttggttattttcaggtttaccattctgccttgccacttccccaaattggttagtaagcgctctttgtcttccatgtcacttcctctatctagatttcaccttagatggaacgtaactaagatgaaaagttgctgacttctgaaatatgcaaaacaaggagattaataaaagtaactgtcattttaccatattcttttatcattcttctatatacttttaaggcatcatctcatttaattcttaccacagttctaaattctatttttatttcatattacagatgaaaaaactgggcttagcaagcttaaataatttgtggacccaggatttgaactccagctttccaaagtccaaatgtataagcattgctctatatggtctttctgtcacttagggtactcattagagaaatctttccatgagacagttcttctccacctctccccggaggaggagggtgtggggaaatgaagtgatatgattacaacaaaacaaagaagacaaacatagaatctgacaatcagtaattttgatcacagtaagtatttgaaactgattatctctgaatattatgaaatcaaaccacaaaaagacgagaataaaatatataaactagcacaaaattatgcatttaaataccatgaaagaaattttgaaaaacaccagtatttcttagactatttaaatcattttcagacaaaaattatatattttgagtaactctcattaaagagataaaatgaattagaaaaaaagaaagagaatcaaacttacaaagaacttaaaaattagcagttataaaaagcacagctctccaaaaacattaatgaaatactgatgaaaatttggttttaaaatatgatgaaaaacatgcaagttcattaatatacaatgataaagataaaacaattctaccttattcatctacaaatttgtgattcaaatggtacatattttatgttatcttatttcagttttcttcccttttactttctagttggtcaaacatttgaatccatagaattgtcctatttgttagacctctgttgaagttattactgttattaatatttaccaattatattctgatattttaaatattcaataatatgaatgtttatatgagttactaaaatgggtatgcctaggtaaagtagcatattctataacatttgtttacagattgtctttcattttcaatatgtactttcccaatctgtatagtcaataaagtggaaagcggtatattaaagctagacaggcaactctaatcatggcttgactcctgtatgaattggtacaaaggatgtgttttccataattagcttccatgtgctaaaaaataatttaacctaaataaatagaatgtaattggcctttcttaataacactcaggttgtaaatcaatgaatatgtttaacatgccaaacattatatttgtcacatagaattgggaacataaaatctgaatgattgttaccagtagaattcccaagagaacttttgtttagtacccttaatatgaaagtatgttttttgttttatactaagatacatactaagtagaacactagctataaatagaatggaaaatacagccactagagtttaacttgatacaaaaaggaaaatctgaagatctccagtctacttgggcatgcttgagggaagggaagggagagtaggtcatttcttctcaccattaagaaaagatgcatgaatgcctcttggtgagtgatcattgttatgagtgattattgttatgttatgagccacatattcctacctgtaagcctagtttgaaaaccaaatttcatttataactgatgattagaaaaagactattcagatttatatgttcctgtcttgctgttatttatcactctttcatgatgaagttaaattttgagtctggaagtacttggaaaagattaaattaaatcaaatacaatattatatctttttaaaatcctaacattagtaggggaaaatgttcaagtgagaatgattaagggagacaaagaaagggaaaagttcttctgtgatacagggatttatcttatgcttactcatgatttcctcccaacattcatgatcaatttccactgagcctttcctgggcttgtttatgcaagtatctttatttgtcagctgactaaacaatgtcaggcaccagctttcgctaggcattaccatatcaggtggtaactactctgcaatagtatcatttttttagagctagtgaaaagagcatttggctgatattgaaaaaaacatgagtttgaatttcagctggcttaaccaccagttgtgttaagctaggtaattcattcaaccattaggacatttattgtgtccaatccaaattactgacattctttaatatgacctctaaagacatttccattggtaagcttctaacgttgtgcacatgtgccctagaacttaaagtataataaaaaaaaaatttccctgtgggaagtaaccatattcccctatgtagttgggataagaaggtggcttacatttctttttttaagtgacctgggagagcctttatgttggttttggatttcaagatttctttgtagacaatgcctgagactattccagaaacaaacttagaatattctatgaaagaatgagaagaagcagtattttaaaatggattcttactctggagtacagagatgatatggcaaaacaggaacggatacaaggcctaaggttgtggacataaggatagggcactatatcctcattcaaaataaaaaaatggggcataacaaagtttcaagacaagtaactgatgcttgcctggaagtggaaaactgggaaggtaaatttgaagtaatatttaccattattataaggaaatgatgcccctcctagttgtagcagcaaaagagaatcaccttttgccccacgtgaccatttgtttctgaaaataaagagggtgtgggccagaagatttaatctactgaagaggatgaaagctacgctgaaggggtagagtagggaaccaaacttaaaacagagatacaagtctcaggttctgctttccctcccgctgcctcttcctacagccacgctcctcacagatcgaataaaaatgaagagatgctgagacaccaacacacattatttattactcaaactggcagcctcacattatctccttccattgcactaaagaggcagctgttgaaaatatggaacacagaggggaaggattccccttcatctgttgattagctggagttaacattttgaaaatcaatgaaatgcaacacaatccagtggttaaggtttgatgtcatacatgagtttggaccttgactttaacctcttttagtttcagcttccttatgtatataatggagaatataatggggccatcaaaataatggccgatgtttgcttagcatagggtcaaggacatagtgatgctccataaatgggatgactattaatcttctataaattttgttatactttaacatagttgtttattctcttcttctctggaattaactcatgacaaaatgccactgctgggttggcttccttgcttaggtctatattctcagtactcagaacagtgctttgaacatacaggtttttgttgctaaactttgactattctactgtctgggaagaaatctcactatgcaagagttaagtgcatctagctatatatactcagtgttccaccaacacagcttacttctgtaataaaatacacaaaagtagtgagtattttctctctagactgattttaatatgtatgtttacataattatagaattgtaaaatcttaactttgattcaagaagttgtaatttttttggggggggtcaggacttctttttaattaaaatttactaaaatataataaaagataagaggaacacaatgtaagtcctaatgcatatactgtcctattaagcctagatatagaaactttctagagattgctagtgatcaagaactatgtagttttgccacatgagccctttcaatctggtggatttaattccttcttcatattcttccccgtctccttctcattctcttgcccttttctctcctcctcctccttcccctccttctgtttctttttcttcctctgcatcttctgctaactagaaacttctttcatatcctgtgccaaatatgtttccttccttacttaaagtaattatataccaaagaaaatcacttaaactcatgctactcaaagtgtggtcctaggaccagcagcactgaaatcacctgggagtttgtaatgcagaagctaaggcgtcaccccaggtgatgtgtatagcttgagaagcgctattttaaccaaacttgttaactactctagggaagatatggttttatccactagagggcagtaggacatatgtaccactggcattgcatttatttcccaattaaaagctcttttaagaaccactctcagttgccaaatggatagtatgcttggttcctttaaaggaaaaaacaacaaagtcaaaccaggttacatagagaaattcaacatgtgagattaatgaaataagcagttccatggcactagcatagtataaaatcaggtgccaaatcctaaattgtgattttggctcttgttcatagatcatagaattataaagctggaaaagtctttgatactcactggggcaaccaacttattttacagatgaggaaggaaactcctagacattaactggctgtttcaaattcatacagcttccaacttgccaatccaaagctggaacttctaccaacaaaatccctacccaaagattaagagagagagagagactttaacacgatgctaaacacctctttgtattatttaaatggaaaactggggttcatacttgtgctttacacatctattgggtttaatagtattcgttgtttctgaagaggtggggagatagggaggaattggtaggttttttttttcccttcaagttatttatattctgctgcactgccatcagaacacagcttgcatgtctccatctcaagcccaaaagtgtccacattaaatatcaaccaatcactaagtattgagtaaccacaatattcatggcactgttagacattctttttagcatgatgctagcatgatttctgctctcgatgatctttggttatgtgttattaacagccggctggtaactgcttttaattttcaatcccacatgtattttgcatgcaaaatgggatcaacaacattgtgtcagactcagagacacaaaaggtgatgaaaactgagctgatggattctcattcttctaaggaattggcaaggctttacagaggaaagaaccctaattgcacatacaacaccctcagtacaacttgctcacatgtctttaaaatgaccttttaaagaatgttttaaatgtcaatgcttttttagaaaacattgaatcaaacatgaaaattgcttgagaaaaattttgcaatctccaattaaaggcacagtcacatttccagtttccttttcctctttctcttattatcaatggaattatttaataaagcctaaaatcacatgaagtttatggatgtaagaatttggatactgatagatgtttacaaacagtttctaagaaagagactgaattgttaagcaaagctccaaagtgaaaaatgtaataagcaaagtcttggtggagtggccccagaaaaaaggagctcctaaaataagtgcacaaaaattttaagcactatctagtctggcttaatttgtatctggacaaaaggaagaggcttgtcagaaatttaaatttagctcccaaagaaatttttcagaactatgtcttcaaaccacagaaaagcacttctcatttgtctctctctccttttaccattagctttagtatataaatgaagtcataaccatcataattttaccaggaatcattacttatgatgtcttttccccatgatctcaccattaattattaagaatatgaatgcaaattactgtttgtgagacaaagtctgaagaaaacgtccatttttttaattttaagcaaacagccaataatctcacaaaaaatgacgtctgatcaatgaagttgataattcttagtttatattttgaacagtttaaattgtaattttgacatttttctaagagacagatgaggctttatattgcttacataagctatgtatgctctctatcctaacaaatagtgcaatagccatgaaagaaaacactagcatttaatatgctttaccttcagcattcattacatacacagttattttaggaaagtaatgttaccatttggacttactctacctatttcatctgagaatatcctctgttttcccctcattataataaaagaatagctctcaattattgccagtaatattagtgacacactcatgtttatatctcaaatatgcttttaattttctgaaacagaggcaaattgctggtgatatcttaatgttttaaggtagttaatgccaaaaggcttggatctgatcttaaactgaatatttcccagatgtttggtagggtgaaaggtggaactgctaacagaaaccaacttcctatccctgttatacttacttaggtgaattttaagtaaggattaattagacattgagaccttataagcagtcaacttcacagctcccagagataaaagctgggggcttgctcagttgtaacataagccatatgttgagaaagcgaagtctcaactgccactgtctccttgcaccttgtttataatgctcctttaactttcttttgaaaatgcaatacttttgaaaatgttgaaaaactactaaaggattagacaacttactgtttttgagtaagtattgggtaaatactaaagttgcagaaatacatccaaaatatttaactcacaagaatgagctcataaatataaaaggacagcttatgaatgaaaagaggaaactgctattaatgtggcttatcctagaccagctttgtactggcagataccctgaggacactaaggctctgaaaactctgtgtctccatgggaagccaggctgcctattataggaagaggaatttagcgcaaattcacagttgtttgcccagattcagtagggactaaagatgaactggaacaaggtcttgccaattacccgtgcttaagggttgggagctttagcttgacaagattttgccacctaaaacagctgttttgtgttggagaccagatggtaattttgccaaaaccacttaaaaggtccaagccatcaatttcaaagcaaatgtttcttatattgggtacatgctcatttttgtgattttttttcatttaaattttcatgtgaatatgcgttctagtttaggttggaggtgttgatgaaatagcagatagtgatgccaagttaagaaactatcaccaatctatgccagccaatgagaaagatctacttctacaaatatagaaaagactaggccaggcacggtggctcacacctgtaatcccagcactttggggtgccgaggcgggaggatcaagaggtcagaagtttgagaccagcctgacaaacatggtgaaaccccgcgtctactaaaaatacaaaaattagccaggtgtggtggcatgcacctgtaatcccagctactcaggaggctgaggcagaagaatcacttgaactcgggaggcagaggttgcagtgatctgagattgcactagcgcactccagccaggccagcctgggagacagagtgagactccacttcaaaacaaaacaaaagactgtacttggtaaaaccaaaaggaatcaatgaaatgcacctatttactaacagtaagagcacaatctatattattaattcttcaaatacgtcaactagttattctgggttggaatccacttgaaataatttttcttataaggttttcctcttcttaggctatttatttattcagagacagagtctcactctgtcacctaggctggattgtaatggcgcaatcgtggctcactgcagcttcaaactcctgggctcaaacatcctcccaactcagcttcctcagtagctgcaactacaggtgtgcgctgccatacccagataattttgtatcctctccacttatcagtgagaatacatatttgtctttttgtgtctgacttgtttcacttaaaataacagcttcctgttccatccacgttgctgcaaaagacactcagatggagggcagtaatgcaatcacagctcactgcagcctctacctccttggctcaagtgattttcctacctcagccttctgagcatctgggaccacaggcatgcatcaccatgcccagctaatttttctgtgtgtgttttgtagtgacgcggtctcactatggtgcccaggctgctctcaaattcctaggctcaagcaatcctcctgcattggcttcccaaagtgctgggattacaagagtgagccaccatgcccgaccattagactttttaaaagtattttatgaatatacatgagattgtcagtatgggttaagatctcatagataagataattgtaagggttaagggaaatgtacagaatctgataaataagtatcttgtaaagaaaacaactggttatatgtttttatgtctgtaataaatttgccagcaaatttgctacctaaagaatttgtgtcaccattttgcttcagtttcaaaggcaaaaatatctctgactttccaatgcggttacgttgtttagtagttagccagcaagggcaactgaacaaaagaaaactgttggttctaatgagcagtactctcctcactcaacatctatgccaggatttttggaggggttacataaaggtgaaaggaaaaaaacaaaacaaaacatgaaaacaattttcaagtgcagccatttaagagtatagtatgaatgtcccttgaactttgtgagtgggaagacatctaaggaaatgtctctgtagctctccttttgaaaatcaatcttaactggacaagacccctggccacaagcctatgcaattagactgcatatcctagtaccacaaatgcaattgttagcagctgtctttgtcaacaggcaagttggagaaacaataaaaagaggagctggtgatgatgaaagaggaagggtgtgaaatggttgtgtgcttcctagtagtctttaagtctccacatacagaaaagaatttgtgctcctccctttagctaaagtgttgaatgactgagaaggcaaagagggatgagaaagctgtttgttgtctagaggaagaaagataggatatcctaccatgtcagaaagctgttaaacactcaagatgaaaacactcatcaggattttagaatcaacaagcagttgtttatatttggatgtttgcagtggaccttattaccttaacatccttgaccaagtttgtgagacaaagaatatccagggtgtggactgagatattggactttgtggttaagggactctttttaaaaaccttttttaaaaggttattatgactgcaaacttgggtaagaaaagggagccaaagtggtccttggcttttgttgtggttgaagcaagtgaatttagaagaaaaagactgagcagaataattctggtttaggcttgggactcttttattagttctcttcctatagcatacaagtcacaagaaatccttcttatgtttcgtagatggcttttatacccagtaaacatcaaatattgtcagtgtgatttttcacagggatacatttagcagtcagtccctcatggtacacgtttattattttgagttgaatatgcatatgttaaataatgggaggattcagcctcaggctggaaaccacgctgaagactgaagaaaacttggggcagtgggtggggagtgctgctctatagtcctgcctaccctggaagggcttctgattttaccccactgagtaccctgggcagagttgagacacaattaaatagggaatacctgccaacagaggaacagcttcccttttcctgtagtgtcccctttcaacttgagaattgaacagaaagaacaccgagcacttctttcttctttcctttttctaggaaaaaatgagtttgccaagttgaaacaagtacttttcacatgagtttcttcagataaatttattaatttgtttacatatatacatatgaaatatgatcccggtgctggtagtacagcatcaggtaagagaggcagatgaggtccatatgaagaaagaagtatgctttcaataaactaagggtggtctcaacactttgggaggctgagatgggaggattgcttgatcctgggagattgagaacagcttaggcaacatagtgagacctctgtctctacaaacaatattaaaaaaaaaaaaattagctgggcatggtggtttgtgcctgtagtcccagctacttgggaggcagagttgggaggatcgcttgagcctgggaggttgaagctgtaatgagccatgatcatggaactgcactccagcatgggtgacagagtgagaccctgtctcaacaataaatacgtaataaactaagggcaagttggatctcttttaacttcaagctaaatatgccatcctcttcatcatacttctcaattgtactacatgatcagagatcagaatgttgaaagagtttgaaatctgcacactaaacatttctcctctaaactaaaagatacctagttcttgtatcagtgcattaagaaataggctcagctacacagtagctataatctatacataaggaaaaattgcttaatagagttctattcctgagttccatttccatggtttgccagagtttaattaagtttctcaagctttttaagggcatgtctatttttatttatttctgttttggttaagttttatttttatttttaaatgctttttgacctgtttttgtataagatagatgtgtatctattcatatacatacctattgaataatagtgactgtgaaatatatgctgtatgatgggtactgaatttgagtctattttgttgaaatatagagacttcaaatatatcttttcttttttttaaaattttgtattatactttaagttttagggtacatgtgcacaacgtgcaggtttgtaacatatgtatacatgtgccatgttggtgtgctgcacccattaactcgtcatttacattaggtatatgtcctaatgctatccctcccccctccccaggccctggtgtgtgatgttcccttcctgtgtccaaatgttctcattgttcaattcccacctatgagtgagaacatgcagtgtttggttttttgtccttgtgatagtttgctgagaatgatggtttccagcttcatccatgtccctacaaaggacatgaactcatcatttttgatggctgcatagtattccatggtgtatatgtgccacatttttttaatccagtctatcattgttggacatttgcgttggttccaagtctttgctattgtgaatagtgccgcaataaacatacgtgtgcatgtgtctttatagcagcatgattgataatcctttgggtatatacccagtaatgggatggctaggtcaaatggtatttctagttctagatccctgaggaatcgccacactgacttccacaatggttgaactagtttacagtcccaccaacagtgtaaaagtgttcctatttctccacatcctctccagcacctgttgtttcctgactttttaatgaccgccattctaactcgtgtgagatggtatctcactgtggttttgatttgcatttctctgatggccagtgatgatgagcattttttcatgtgtcttttggctgcataaatgccttcttttgtgtctgctcatatccttcgcccacttattatgacactaaatttgatgtctatttggatatcatttataagatccttatataaaaacaaataaacagggtttactttgaattttaccaaggaataatctacattgaaattatgttacacacagtttttttcctgatctttaagaattagcaaaaaaagaggaaacatttgcaaaagaaattgaatagtatgaaactgttggatgttgcttattccttatagatgtttacattaatttattaatctgacttgaaaaagtcaaccactttacctagaattaggttttgccattttggtggcaagttgaaaagttgttttcaaatttgtccagtcttttccagcctttgtttttccctgtctcatatttatgtaccaacattttaatcatcatgcattattataaattattttatttcagttgaatttaataattatctgacaacactttataagctagtcagatttgagaaaatcaatttaaagtccttcttacaattcattatatgcaataaataatattaagagagtctttcttctggaaggaatgccttcagattttgacgaataaatgtaaataaaaacatttcttcaagatatgatattgtgcggttttatctagctgaacccaggtacgttaaaaagaagtttaaggtaatgtttttctcaatattcttcttctaagttttaaaagttttgacagtttcagataaaatttgacgaggaaagttagacatttacagttaacatggcttggatatatattttaataatgcatttaataatgtaatatatacaaagtcaagtcagttcaataattttcttttttttcagtgtttcttctcttttaacttttagcttttgcctttccctttatgtcccttgtcctttaatctggatcccagcaatattttatgtgcatgagaactcaagtacatagtagttttaatctatcatctattcttaaataatgaaatttcaacatattccatttagaatcatttactaagacaccaagaggagtatgaaataacacttgtttgtgtgtagatagataggtagatagatagggatatacattatttttatccacttactattctctttgcatttttaaaactctcttaatgtttcctgttgattttgtagcaccaattcccacataaaatgtgtcccttacccatcagttttcattttcaaattggatcagatagatcatgttttttcttaaagggcatgagcactttctcaagaacatactactttaaaacaatgtaagcatttttaaaaagtaaaacaggataatgggataatttctggtcttttctatcaagaggaaacagatcataatgtgccagattgcactcatcctctctaggaatttctttatagatagtttgttaactcaagacttaataaaagtgtttcatgagctttagaaaaacatcttacctaacaatccatttcccacatttaattacaaaaaacaataatgcatatatgttggattctaatatcaatccttagttgcatcttactaaagaatgagtaatgctccctccccacatgtggttaaggtaatagtacctgttcttagaccatctctagcccagtgttgcttttcccatgttatctgtactataatgtcagattttcatgctgagttctaatatttgtttaattactttcttaaaatacaatttttaagcaccaggaaaaccctttaaactaatttctatgaaagtactttctctaacatttcctacaaaatactggctgcatgctttactagtagtcacattgtatttagtagtcagaaatgatgtgtgatgctctcttcttgtatttccaacctatgggttctgttttctttctttgccaagtgtgagttgtggcaaaaataggacatttccatggactttagggataaagaaccacttcagtcttggtaatcatcccaaagggggtgatctgtagtccagaaagccaggaccttccaaaacatattgattaaacatctcctttacagcagaagccaaaaatctttattgccaatattataagttatagcagtgttccccaacttttttggcaccagggactgattttgtggaagacaatgtttccatggaccggtgaaggagatggtgtcagggggattcagtcacattacttttattgcgtactttatttctattattattattacattgtaatatataataacataattatacaactcaccataatgtagaatcagtgggagccctgagcttgttttcctgcaactagatagtcccatctactccataatctcattttggttgctgtcactgcagaaaaccctgcttcacaaagatagaatgttggaaattgaagcaggctctttggtgcttttgtggcaattacaagatattctgccttgactttaatccagaacatatggagatttgaagttgtctcaaatatattttaaagtccactgtcatttgtgatctcaagcagttgatccttttctaacatggacaaagtccattcacctggcttattcataaatgggtcatggatccatttcttcccagtttggggtcttttgagtaatactcaaatgcttttgaaagctgaggtaagtgatcatgtaccagctgtgagaaagaaggccctggctcagcctctttataaatcacagctaatgtttaaaacatatcagaaatcccaatgttcactcatcacccccataattctactttggcttttaatgcagacccttttgctgacttgaacacagttctcattctcccctgaagtgacagattgagtttgttgactaggttgaatatgtcacacaaataggcaagttttgggacccattctgtgtcactgaaatgtgctgccagtggtgattgttgttctaaaaatctctggagtagttctcataactcaaaaactctggccagggatctacctttaaaaagccatctcacttctgtgtataagggaagatgtagctgggcgcagtggctcacacctgtaatcccagcactttgggaggctaaggcgggcagatcacttgaggtcaggagttcaatgccagcctggccaacatggagaaaccctgtctctactaaaaccacaaaaattagccgggcatggtgatgggcaccctataatctcagctacttgggaggctgaggcaggagaatcactggaacccaggaggcagaggttgtggtgaactgagatcgtgccactgcactctggcctgggcaacagagtgagattctgtctcaaaaaaaagagaagatgtgtgtgctctctgtctgtctcctcacagaactgtgcaaacagacatgagttaagagcatgtactttaatgtggttgataattttaatcacatcctgcaaaatgttgttaagttcaagtgacattttttggctagccagcatttctctgtagatgacacagtgcatagactcacattcagaagcgacctctttgacccgagcagtgaaatcagaaagccattttagtcacggcagctactctgtctatgcatatactgacacaaaatgaccaattcagttttcttgatatatattcattcaaagacttgaatgtttatgcagctgtggtgttgattgccaacaaaagtgcacataacaaatcctcatgcacatcctcctgaaaaatatattgcactaaaacaagcattgttgccttgtcaacatcaatagacacatcaacctagactacataccatggtgactcattagtcctctctaacaattgtgccctgatatcccctgctatttcatcaattggtctagttatggtgctagctgaaagaggaacatgtgccaacttttgaactgcagcctcttctgtaagttcatgacaaatgtccttagcagcaggaaggatcaactcttcaccaatagtaaagggtctcttagctgtagcaatgtggttagccactaagaatgatgctctcagtttagacacatttgatgaagtggtgtccttcaatgtttgcttctgttcttcatgttcatctttttttttttcttttgaaaaacttcaaaatggactggcactttgggaggcctaggtgggtggattgcttgaggccaggagtttgagaccagcctgagcaacatggtgaaaccccatatatacaaaaaatacaaaaatcaggcatggcggcacatgcctgtggttccagctactagggatactgagatggaaggatcacttgagtccgggaggcagaggttgtgccactgcactccagcctgggtgacagagtgagaccctacctcaaaaagaaaaaaaaagtagagaaaaagaaaaaaaaagaaaacctccaaagacttgaacttgacttttgacacagggtgcttaatctgcatgtggtgaagaagttttaaaggttttatggcttttttggatagccagtcatcacatattatacaaagcaggcttgcagaatgaatgtgaatcacctgttgcagtgaacccataatttaagtgggactcttgttattttcttttaaatgctgaatttttgtaggcagtcttagaagtcttccgctgttgcatcactgggtctttccctccttcaaagaagcactccagtgatgtttgttttttactcattttggctgggttagcttgagggcttaccaaaactgtgactgaaacaagtgcacagtgcaggaaagaagcatgggtggaagtggtaaatacaataatggatgggccatacatggactaaattaagtgctagattctgacttaaagcctgacaccagatgcagcacagatagggttttgatatgagtctgtaagcaactgatttatgatggtctctgtgcagtcaaatctgtctgctaacgttcatctatatttgcatctgctcctcagtgctagcatcaccacctcagcttcacctcagatcatcaggcattagattctcataagaagcatgcaacccagtccctcacatatgcagttcacaatagtgttcgagctcctatgagaatctaatgctgctgctgatctgatgggaggcagagatcaggcagtaacgactgatgggcagtagctgtggagtggctgcaaatacagatggagcttcactcactcaccaccggccacttcctgctgtgcagcctggttcctaccaggccatggaccagtaccagtccatggcccagtggttggaggcccctgagttacataaatatatagttatggcaaatgaatcaatgttgccatttgtcaagtatacataaatagataaattgtctttctgcacaatcaaatcaaaattcacataccacacagtggaatatatatttcttataagtattatgattacccactaagtaatcatggaaataatctttgaaggaattaagaggccaattatgtattattctataccatgttggaagcttgtcaaatttacaatacacatgttcaaagtgagcctacagcttgaacccctcaaacttattccatattaagtatttaaaactactcagggctgttcatgattagcaaatttgtgaacactttaatgcatcaagtaagactttttcttacaggaaacccaatatcaagatgtgctctactgacccattttattattttccttaaattgaggagaaaagatactctatattataattagttatattaaagaaattcataaaaacctgagtaaatgtggtagacagtttatagcaatgtctttagggtaaatgtctatattaacatgttgatcatttattaaaatatgccatgcagtaactcctctaaccctttatgtggcttaattttttttctctctttataaataaaatgcagtggccaagcccaaatagaatgaattgtttctgtgtaatgaacaagatataaaatctttgcctggctgccaactgtttgtaaatgttagcaggagcctcatggtgaggtagactaagtatttacttaaggctctaagtaacctttacaggtaagtccctcaatctctctggatttcccaatgtcatctattacgaaagagaattggatatgaaacagacaatatctagatttcttcgaaatcttctctgactctacaatttgctaagaccaagccttaaatgatctgaacttttctcactaaaataacaagtattttttaaatttagtaattttagctcaaattagattgatcagaggttttgattgaacatagaagatatctcaaaataatgtaaaataacttagtactttggggaaaaatatgacagttgacatgcttgccaaagcttctgtatcataatagatctaatctaggtagtaagttggcttctactgatgcataacatgtttctaacattattttgcattctggatatattttcccagaagtgataacattgcaatgattgtgccttatttttgcatggtcagtatatgaaactttctgtacagactggcagactttctgtccttccaatgctcgcgagaagacacaaaccacacaaagattcccttgggattttccttaaaatatgaaatgcattagataagaatagagacaaaagtgggatgtggccatgatgctctggcaaaaagccaggatttcgaacttttcagaatttttgaagggttgagttatctactaaaggaaatgaggggaaagaaaaaccaataaattgctacataaaactttatatagaaatatgttttctgatacagaaatgtttacctatcgggaagaattactctctgccttgctcatggctttgttaccattcaaatgaattgtgcaggacttttctaacgtaatcgttcaggcttcttttcttaacttttctgtcttgtaccatttcccgcaatttatcccattgcaaaatgggatcaaaagtcagttatcttgggtcacagcaaatgactcaaacatgtaagtgtttccagtagttgttgtttttttgtttgtttgctggattgctggtagttgggaataagggtagagtttctatctccaggggaacacaagcttttctagatctttattttacccaaaactagcgatagaatcatttcacactttgtgaattcaatttatatcagcacttattatgaacagttctcaagaattacaaatccatttctgtcctagacacgtgtcatttgtgtctcactgtgaatgtatcctaagaacagagaggataatgtttgaaaacatgacattattacaatattgataagtaattatttcctgaaatatttccataatgttaaatacatttaaaaaatctctaccagtgaggaaaaaattagaaaaaaaaagtcaagtttaccaaatctattgatctagcacagtgttgtgaagaaacctattagatggtcatctgcaaatatttgttcacttatgatcactgtgaaagatctggagtcatatttcatttgtaataaaaatgcagtaagaaattgatctttaacacactttaacaattaatttaccacttaagaatattgtccctatattgcattgtaagtttctgatacttttaatgttagatcaatgacaatggctgaatgacaatattggttaaatatagtcttaaattgacaagtgttttgggatctgccactgtactcatcaataaggctaagctaggcactgtatttatcctatgacttgaattatcaggtgagaatgtaaaatgtcattttggtatttagcatactgtgaaagatatatcatcttatccagagatagaaaggattttctgcaaattcagatctcatttctatctgtaattccaaatgcatgtcaagcgtattgacagaactgtggaagatagagaaactaaataactcaaatacattatactaaaaaggcaaccagagtgtataatggtaggaggtggactagacatagattactgattagcccagtctagtaccctccttttaatggcaatgagatcattctagagcaagtattaatacatgctttcaacactgggtgtagggtgaaggataaagtggagccctattgctttgagacaatttcttgaccatgtgcatatatttaagggggccatatagtcctttaattcttggtgttaacacagttagccctttgaaaaagcccataaaattcttatgagtagttgaaggcacttaagtttccaccaacatttccacacttttaaaatggagaagaaaataaagattctgatgactatcaacaacaatgcagtatatctgtacacaaatcccaaattcacaataccatagttatgtagatgttaaaaatcccatacctgttcaaaaatgaggttactaattttccacattgtttaaaatttttcttgttgttaagctgccgctattacttgtgtgtattcctgtctgtggttctgcttctatgcacacgttctgtcaatgcttttttgcatcaaagctgtgctttgtctctgaatcatattgtatagaacagtgtgtggtccttggaaaagcagaatcagcactgtttggaaatatgccaggaattctaattctctactccaatctagaattactaagtcaaaaatcccagcaatctgtctttaagcaagtcttccagatgattctgatgcacgttcatatttgagaactattggtatagaaggttggttaacttgccactattctgattgagcacacagtaaatatatatttagcacccactctctgagattctttgcaaccctatgagctataggccagcggtccccaacctttttggcagcagagactggtttcgtggaagacaattttttacacgaaagggaatgaggagatggtttgtagatgaaactgttccaccccagattatcaggtattagttagattctcatatggagtgtgcaacctagatcccttccttgcattgttcacagtagggttcgcactcctgtgagaatctaatgctgccactgatctgataagaggcagtgctcaggcagtaatgctagtgatggagagtggctaaatacagttgaaacctcgctctcgcttgcctatggcttgcctcccgctgtgtggcccagttccaatattggtccatgggacattacagttcccataatgttttgaggcttcacttcatttaactttgtttcatttttaaagagaggtaaaaccacatttagagccatttagactcacactatggtatggccacataatcccagaggtattagtgaaaatgtgataacaaccccaaggagctccctaagtccttctgtgctaggatataatagatgaacttaggacactgacaacaattcttgggagagagaggtttcatttagagaggttagtatttgtgtcttacattgtgctaactatgatatgtttcagcaccttgattaaaactatgaaactatatagcattataatcaatttcaagttaaaatgtttagagaaaaatagatgtgactgattctgaattaatgagactttccacgtttcacaataatttttttttggaaagtacattcctcacccagaaaagcaccactaccactcaatgaagcagaacctttagttttagctagtggccacctcaaagtgccattgggggaggtggggagaaatgtggctcaagcacttgagctctttctctctccaagcctgtttttatgcatgcactttctctccctggaatgttccttctcaacttcccaaatcccccctattaaaaccctgctcttgaaaagtcacctcaaacaccagctgtcttcttcaggatggcttcactatttaaagtaatgtataacatattttatctctcataccacacttaatatattttctttctggtttttttttttttttgtattgtcattacttatttgggtctttattttattgagctttaaaactccttgaggcaaggaccacatcttgtttgcctttgtaaccttcagaatgagagctaacacctaccctgcacactggtgcttaatacacattagctgaattaatttactcagtctatagaattccattgtatatttatgttctatttatctaggagtggatagaaggattttgcacttatttttcacatctagttttccttgtctatatccattctattaaatacaagttttatttgccatatactttctccttttgtgtttatggaaaaatatttagtgagaaacttaccctccagaccaatagctttttcattctaatagcaccaaaacagaagaagcctttgtccaacatgattgctagggggacaataggtcagatgctcctcttctggagaagaatgagaagcagcagctgggaaagatgcttgtgaatggccaccttctcagattaactatttagtcactcatcaaaacattaccagcccaaacaattatatatatgagtattaaaagaaaaaaatgcatttacacgaaaattgtgacttctaagttatttccactcagagattatcaagtcacaaaattttctccattactaaggtgatgatgcatcatgagggaacattcgcaaagtaatatgaactgatttttgtcataatcgcttttgtaatgttgactatcaaactttattttttaagattttaaatataatctaaaataagctttatagattgctactatttactgaagaaatttgctaaatattactttatttctaatgtattctttaaacaattttatatttgtagacaaaatccttcctagttgccaaaattcttagaatctgcacaagatgtttactaaactgagtctcattatctcccaacttcacttttcccagcttcctgacttgttccttgtactccagttggtaaatcaaacctcttatgatatttgaaaacaccatactgttttaccttaataatttgctcttgccttcccacccttcccagccttcccctggacacttcttaaccttcatgactcagttcaggtctcatctccaacaataatttgatcgtggaaccccagccagtatgacctgcctttacctttgccccatagtccccttgtcatcatcttaagtcatcacttactgccatgtaacatgttttattgtaattatctgtgtttgtcttttattcccaatagtacatagacttatcaatagaaaagccattacgtatttgactttatattttcattttctaaaagcgtacccttctcctcctaggtcttcctaagtgattgaactaaattgtccaaagacccttaaatagattcacaatactacctgggctattcatgttttaagggacataaaaactaatatagttacaacttaatataaataatagaatttcactacaagaatatgcctataaatttacaaaatatctgttttacatgaatgggaaatataattcatgtgtcctttcattaataatataattttcaggtgtttctttgagttaaaaaaaaaaaaacctttttttatagcttttaatgttaaggtaattgtagagtcataaacttgtaagaaacacggggagatccagtatgcccttaactcactttcctccaggaggctcttttaactggcatttagttttgattcaaaatatacacatatagaactataagctactgatccaacaatcctcaaacaaaattctggagctcctttccaaaaataatttgataggcaaacttgatcatcctcaccaaagaacagaaaaactggagtgattccttacaaaaagtaaagaagtcctctaggcttcagtccttcagaactcccctttcacattcacagatgtttataataggtgcagtcattgtccattactcacaagatgatcaaattataacttgcctgaccatacgctgcgtcccaaaattattttcaaaattcgaaaggatattaaatcacctatgtcttccctctattttgaaacaataactaaataataatataaaaataatagctaaacctttttaagcttgcctaaactagttgcaaagtggaaaaaaaatggttgattgagtctttgaatattgtgctcccatttcaggtaaagcagaaagaaacaaaggggtatctaagctaaatataatctacaataccacttgcagttcatcctcagaaataacgggtcaaaaattcagttgtatcttatactattactatagctcagtctgttagtatagtttaatcccaggacgttgcatgcaccttcacaaatattggtttattttttgcttaaaatcatccttcattcctctttgttctattaattttcagtttcaaaagtatacataagagaatatcttgcagtttactgacagtactttcttgtcttttggccagacaatgtaagcagctgcctaatcttttgcccctgaattctacctcctgctctgctctgtatcttctgcttatgacataaataaagtatgttagattttgttctctaagattcagacgttatcctctatggcatgccatcatccttgggaggaacagcacattaagtcattaaagaaaattatcttgatgagtcattttgtcagatggtttgcaacagggttcccttgtaggaatgggaaagaggaggaagatgtgatggagaggcaaagtagtcagagatggggagcaatagagtctaaaagtcagaggcttaagtgttaacatccattattaccgacctttatcaccttaccacctgtgtgtgtgtgagttaaataacctaagtatcttccgtttttatatttgtaatcgagactaacaacagtatccttagagggctattgtgtgaattaagaaaatatttttcagaatatgcaaataaatgtgcgtgtgtgtgtgtgtgtgtgtgtgtaccttagggaaactaccagcataagggaaatggatgtaaaaaaacacaaataatgtctccttcatccttcacaatctttccttggttttggcttgcaaatagagtgagatatatctcttttgatgaaaaggagtgctgtgttaggtcagagacttcctacagatacatggacagaagggtctctgacatgtagtcttggcaaagtctctggttatgtcaacttggcaacaggggaaactcaagcatttctattggcctccataaggctaacctgtgaaggaataggaaagaaggtattcatctctcgagaataagctaagccactctatctctatgggaagagtgaaaacatataatctgtagactgcattggggatggtgtttctcatgatacatgacaaatgataatatgctcaactttcagatttcatgtattaagccaatgggaatttgtatgtattgttcaggatttacatagcccattgaagaatttccaaaatctagcactgttggagaaaaactaccctctgatgataattaagaagatactaagctccaggcaaattctaataattttataggtactatctcatttaatattcacaacaaaattatgagggaggtactattatgttgcccattttgcaaataaaattgagtcatgggacacttcagtgacttctcctatggtaattcactaataaatgtagagccaggagttgaacccagacattttggctccagaggccacatgctaatcacgatgctacttctctaccctgaacaaactgctgagagttatgaaataagtagttttagttccctaggtcttcttaaactaaaatgggtgggcactttgagtagacgataaactgacttccctattgtgatctacaaacttttccgagaaaattatctttagatgcagcaatcgaaacttgtgtataaggggaaaaggagctcttgtctacctcttactacttccctcgattttccatttttcctaggaaaaaaaaaaaccttaaaaatccatgtttatggattttcccccaacacagagcagtaattctgctatttcagggacagtgcagatgttgggattagtctccctgtatctcagaatgtcaacacatttgccaaaaatgaatctatcagttaaatgtagccaagagatttagattatctatatcctagcaagaagaaatagtttatcactgtttttagagattgaggtaatctggcatattattgacatgtgctacagatttaatttaataccatagtacagatatgggctctgataagttattttgaaatctaggctaagatgagtagagttgtttcaatatttatagggttgaaaatgcagagttagcaaaggaagcattttaattaaaacaatattttctatgtatgctcagagtaaaatgaaggggaattcttttaaagccttattacttttttctatatatttgctggaaatacttgccgggttttaagacacattgaaaaagatttgcttgtttgcttgtttgtttaccaatgttttgtgccttttgtttttagaaccacacaaaaaacaactcaatagtttcttttgattttacttttcttccaaatatatttaggattctttatttagccttttaaaattgtatgttttaggcatcctggagataacatcagtagaaatcggagttgttgccgtcaaagccattaacagcaactattacttagccatgaacaagaaggggaaactctatggctcagtaagtattctgcttttgttttcaaatccactccagtaaaccattaccatagttttggaaagtttcctccagacaccgaatagctttgttatccttctattgctagtaaatagagccacagtgggttagtcaccactgtttcaagggctggcaaagcagctcttccaattctgtaatctcctctgttgttcacccattagtctaccacacaggctgctgctggcatttgtctgtgaatgttctaaactgctaaccaagtcaggctctcacggaagcatccggtcagattggcatggaaaatgaagacaacttggagaaaaaacactaaaaacaaagatcttgaattgagtagaaacccatgtattatatatgcgttacggctgaagatgaaacaagggctcagatgttttgcattttgttaaaatctgaaatggggaaatgtgtcaagaaacaccattttgcttgttgttcaatcaactctagaattttatttacctagacaataacctttaattcaaattatgcctcaaaatcatatatatatatgtgggaaatattctttgcaatagggtccttgtggagcaggtatccctgcagtgctttgggcacatccatgcctatattccataccaggtgttaagtatttggaataccacttctgcaatcttggatcaaactcttttaaaccaatttcttagaaatttaagatctcacttaaaatgccaaatagttgttttataattgcaattgtaataataattaaattacaagcagtgagacaatttatcctgctcaagtccttagaaaaaaatgcatcaatcaatcatatcaacatctactatatgccagatattgtttgacatatcaaagatgcataagaaagaagtatagaaatgggccttgacttcaaataatttataatatatttaggggaaatgttaacaaatatgaaataattacagcatgattggttgttacatgtatgaaaggatcagctatagcaaagcagccctataataaagttgggaactaggtttcaatctcttagctgtcatttgaatgatgacaggagtatattagtttgtgcatgtggatccatcttattgtgtccctcccagagacagatcaaggggatgctaactgaatttcatttttttctctggattctactgaaggggagtgtattgaaggcaactataaacttggaaaaattttaatttaattttttggaggacatgtaatattatatatggccagaaataaaacctgtgacacaaatcttttaaataatttttacttttgtaaacagatcctgtgtcatttttacatttttatgtaatcaaaaaggaatttcactttaaatttgtaaataaacttactttgttgattagcataaggctgagagaaccatttagaaccatttagtgaccatttagaaccagcagctcttaaacttgagtatgcatcagaatcagtggaagggcttattaaaagacagaataatgggacccacagccatattttctgattcaataagtctgtggtgcagttcaatttccatttctcacatggtcccaggtgttcctgatgctgctggtgcagtaaccacaatttgagaaccgctggtctggatgtagagtagccttgtattttactaatatcaggtccacttttaactggggagtcaggcatgctttgagttggtccctgggactagggcaaatgcttttttttgcatgggggtcagaggaattttagtaaaatttctccattaccattgctcccctaatgaacccagaggaataacagaccattataaaaagtggttccatttaggggttcacatcataatctcttttgaggcatgtttaatgttttcattaaacatgtccaggttcttccttgatctactatatcagaattattggggaagagaaccaggtacatattctttgaagagataacaacacacatacttagtctagacccaacgtcctaaagccagctaacactaatttagattaaggaagaaaatgtaaataattttaatgaatataaaagattttaaatacttttaattgataaaatatacttatttaaaaacatgacatcaaggagaaatggataactttcaaataaactctgacataaaaatatttaatacttttcttcacatttctcctctttttttcttctgccccaacacagctcatggactgtgcttatgcttcatcttgagctctaagctctgtgaattatttcattcaaattctttatttaaagtagagtccggtggctttctattatctgcagtggcacttatctgagatttctctcattaatgtgtttgttgttcactgtcttctcccaatagattgtgaccttggagagagtgaggtcagtcttgtcccccactatttgttcagcacttagaaccatacagagcacagttatacactgcataaacctaacctctggtagaagctcagccaattacagaacatactttccacttccagcctgtctcagaaagaaactcattctctaaccataacattcttttttgtgtaactttacatttctactaggaataatgaaaaattatggtttgttcaaattaaacgaaaaatttattcaagttcaatattctgctcagagtggaatagaactaacatcaaaatttataagtgcatatctaatataattctgtatattaggtgacaactcttgtaattcctaccttcattttttgtttcatacagtatccatcaattccgtaagccctcctaaaaatctgacttgggcaaagattcagactgactgattaaaccagttttatatctattctcttgaattatcttcctctattcctttttggaaactgtatacctttcttatattttcattattcattctctaagcaatttatctattgtattttgagttttctcctgactgatgggattcagtaaataaagtataaaactgaattaaatagaataggtcttcatagagcatgatttaaggaccaaagaaaattttcaggtagctggaaaaaatccaaacttcttttaaaaaaactccctgaaccctgcttttgagtccttgctgtagcctgaattttctttttatacataactgcttatgatttgcttagatcctgtcaacaacatatattttgaggcccctcctctagagatttggtacctttggcccaaatatttaaaacatctgaaataaaaaggctgatacatgtgcacttcaatttaagaaacattactctataaattaattttggggaggaaaattaacattaagcatacactcccacttttctatacctagcttcatctgaaatatgaaatcacctcaaacaatctcagtccttcattagtctctaaactgtaccccatttattgattgaaatgaacataattatccatattttaaaaattactctgctttgaaaagtatatagttttagacagactgagataaagagaataaaagtaaatccacactaaggatttatattcctttcaaatacagaattatttttgttttatcaaaatccttaccttaaataatttacctttccttcttactttcagccagttaaatcatcatttgaatgttatatttaaatattactttatagaagagaagcatttaagactaaaaaatttcaggacagataacttgagctggtagcattaacatagaatacatctgcttcttatggttctgataatgttctaaactgtgataaatcctacagacacctaggtatataaacatatacattttcaggaatttggaattttgtagaaatttcaaaaagtctcaaggtgagagaaactgccaagtacagtcctcaactgaactatgcccacggggcccttgctttggatgaagaagatagaaccagagggcaagtgctccaattccttagcttcttaactactttagtttgagtataagaaaagaagctacttctctttttctgtttgtttttgttttgttttgttttgagacggagtctcgttctgttgcccaggctgcagtgcagtggaatgatctcggctcactgcaacctccgcatcccagcttcaaactactctcctgcctcagcctgccgagtagctgagattacaggcgcccaccaatacgcctggctaattttttctatttttagtatagacggggtttcaccatgttggccaggctggtcttgaactcctgaccttgtgattcgcctgcctcagcctcccaaagtgctgggattacaggcgtgaggcactgcggaggctacttctaaagccagagtcttgagatcattgagctacttcctctttgttattaactccagagtaagaacctggatttgtggagtgagtgagagcgaagccttgtccaggaatgtctccttaaatccaattggcctcctgaacaaaaccaaagctctatggctatgggatggaacttcccaggatccaagtccttaagatacaatgtaggcattgctattcaccatgctcataatttcttcaacatagtagttcacaaaacgaggaattccatgtcctagttttcaatccctagagttcacgagcaaaatctgtcaaaattccaagctatagaatattgcaaataatttcattaaattaagaaatttgatatttggaagaaagacatcccccccttttggttatgcagaactattgtggttttgctataagctctgctttcttatgaatgtgtgtgtgtatttattatggatttgtaggtaaagtttgcaaacttgacaagcccatatctttccttcagttctattttttcccatggggcccctggttattactgtaaaagaagcattataacactattctttattactgactcatcacaaatattgttagtgagatgtctacttcttgacaatcactctaggcacttaaaccatataatattcaaagcacatcagctttttaaaagggctttcaaaaagtggctatgatgatcaattaaaatgtatcatgtgctttcaaacagaatgtgttttgtggttctgagatttacttttctattgttgacattatgtattaagtgcacaacttaggtacaaatggcaactacaaacagaatccttggactggagttctctggatggcttgtatcaaatgaaatcaagtacaatcaccataggaataaaagattctgtttttcctttgcagaaagaatttaacaatgactgtaagctgaaggagaggatagaggaaaatggatacaatacctatgcatcatttaactggcagcataatgggaggcaaatgtatgtggcattgaatggaaaaggagctccaaggagaggacagaaaacacgaaggaaaaacacctctgctcactttcttccaatggtggtacactcatagaggaaggcaacgtttgtggatgcagtagaaccaatggctcttttgccaagaatagtggatattcttcatgaagacagtagattgaaaggcaaagacacgttgcagatgtctgcttgcttaaaagaaagccagcctttgaaggtttttgtattcactgctgacatatgatgttcttttaattagttctgtgtcatgtcttataatcaagatataggcagatcgaatgggatagaagttattcccaagtgaaaaacattgtggctgggttttttgttgttgttgtcaagtttttgtttttaaacctctgagatagaacttaaaggacatagaacaatctgttgaaagaacgatcttcgggaaagttatttatggaatacgaactcatatcaaagacttcattgctcattcaagcctaatgaatcaatgaacagtaatacatgcaagcatttactggaaagcacttgggtcatatcatatgcacaaccaaaggagttctggatgtggtctcatggaataattgaatagaatttaaaaatataaacatgttagtgtgaaactgttctaacaatacaaatagtatggtatgcttgtgcattctgccttcatccctttctatttctttctaagttatttatttaataggatgttaaatatcttttggggttttaaagagtatctcagcagctgtcttctgatttatcttttctttttattcagcacaccacatgcatgttcacgacaaagtgtttttaaaacttggcgaacacttcaaaaataggagttgggattagggaagcagtatgagtgcccgtgtgctatcagttgacttaatttgcacttctgcagtaataaccatcaacaataaatatggcaatgctgtgccatggcttgagtgagagatgtctgctatcatttgaaaacatatattactctcgaggcttcctgtctcaagaaatagaccagaaggccaaattcttctctttcaatacatcagtttgcctccaagaatatactaaaaaaaggaaaattaattgctaaatacatttaaatagcctagcctcattatttactcatgatttcttgccaaatgtcatggcggtaaagaggctgtccacatctctaaaaaccctctgtaaattccacataatgcatctttcccaaaggaactatcaaagaatttggtatgaagcgcaactctcccaggggcttaaactgagcaaatcaaatatatactggtatatgtgtaaccatatacaaaaacctgttctagctgtatgatctagtctttacaaaaccaaataaaacttgttttctgtaaatttaaagagctttacaaagttccataatgtaaccatatcaaaattcattttgttagagcaggtatagaaaagagtacataagagtttaccaatcatcatcacattgtattccactaaataaatacataagccttatttgcagtgtctgtagtgattttaaaaatgtagaaaaatactatttgttctaaatacttttaagcaataactataatagtatattgatgctgcagttttatcttcatatttcttgttttgaaaaagcattttattgtttggacacagtattttggtacaaaaaaaaagactcactaaatgtgtcttactaaagtttaacctttggaaatgctggcgttctgtgattctccaacaaacttatttgtgtcaatacttaaccagcacttccagttaatctgttatttttaaaaattgctttattaagaaattttttgtataatcccataaaaggtcatatttttcccattcttcaaaaaaactgtatttcagaagaaacacatttgaggcactgtcttttggcttatagtttaaattgcatttcatcatactttgcttccaacttgctttttggcaaatgagattataaaaatgtttaatttttgtggttggaatctggatgttaaaatttaattggtaactcagtctgtgagctataatgtaatgcattcctatcaaaactaggtatctttttttcctttattttaaaataataattgcacctgacacataaacatagaccacccacaaccaaaattaaatgtttggtaagacaaatacacattggatgaccacagtaacagcaaacagggcacaaactggattcttatttcacatagacatttagattactaaagagactatgtgtaaacagtcatcattatagtactcaagacactaaaacagcttctagcaaaatatattaaagcttgcagaggccaaaaatagaaaacatctccctgtctctcccacatttccctcacagaaagacaaaaaacctgcctggtgcagtagctcacacctgtaatcccagcagtttgggagactgtgggaagatggcttgagtccaggagttctagacaggcctgagaaacctagtgagacatccttctcttaaacaaaacaaaacaaaacaaatgtagccatgcgtggtggcatatacctgtggtcccaactactcaggaggctgaaacggaaggatctcttgggcccaggagtttgaggctgcagtgagctataatcttgccattgcactccagcctgggtgaaaaagagccagaaagaaaggaaagagagaaaagagaaaagaaagagagaaaagacagaaagacaggaaggaaggaaggaaggaaggaaggaaggaaggaaggaaggaaggaagcaaggaaagaaggaaggaaggaaagaagggagggaaggaaggagagagaaagaaagattgtttggtaaggagtaatgacattctcttgcatttaaaagtggcatatttgcttgaaatggaaatagaattctggtcccttttgcaactactgaagaaaaaaaaaagcagtttcagccctgaatgttgtagatttgaaaaaaaaaaaaattggagctattgagagatctgcctctgtaggagtatggtcccaggcccacaaagttaaagtgcatcagccacaaatatgtgtccatttgagttttggttctgagaatactcctcataaagatatagaatcactccctcctcctaactcgcaaaaggctgaacagtgtatagtatgttacatttaaataaaaacaataaaaatgttgggaaaagaaaattaaaatattgtccttgtttgttttattagtcagaaactctacctggtaataaagagagaagctcaagtgtgtgcatggcaggatgtggttaaatgccccacagccccaaacaacaacaacagaaaaaaaaattactcaaacatttgtaagttttctctaatgtttcacatgtgtgagttagctatctttactctaataacaaccaaatgctttcaatcttttctaaatattcaggtccacctaatttacacagtggataaagaaaaatgaattggaaacgaggatggcttatgaaacaatggaagacttttggaggaaagccaggtggctgcagaatctgatttcaaggggatgaatgaccaatgaatttgatttgaaaattagagagaaaaaatacataataatgcaagttgcttccagggcccaagcaagtttatgaacccaatttacatagatcagcattaatgctgcacagttctaataatttggatgctgccaattcaaggtttgtgattattcagtgaagtaaaatttacctttttcatattactgaagggttcagctggtccaaactttgtctaaataaagttatatatgtagcttaaaatatttaagagaagatgtctagtacattagaagtaggacatatacatgcaaacagataccatattgattaagagttcttgtttatttcatgaagcaggacttttccaacttaaactgaaaaaaaaataaaaaggaagaggaatatctttgaaggatgctcaggagaaaaaggaactctgagttctatgagtacttagaaatgaagtaacgaagatctgcttcttctcagacattcattttctcttacccttcattggttttatttggttaggccagattgcttctagtctacttctttcctactccaaaacccaaaaccccaaactcctttactacaagatccaaaaaggtaaacatcctagatataactcttattggccaggtttggataacataccaacctctagaccaatcagtataagagatttgggaattgtgattgaccaatcttcagtgacatgaccacagagaggcaaggtgaagattttggcagcccacacaaccgcaactagtgaagaagagtacaccaaggagacagcagtgctgcaggtgcaaaaaccaaatggttgtttgctacatcttattaaatgaagctgtgacataaaaacattttctattcctatatttcccaccaattccaattattcttcacctgtttgtttgtccaagttagagaggttttaagatcattctctttcatatgttctttaccattgaaagattacatttgcattgttttgttttaagccaagagtagggccctggatatagctaggctcactgtggttttgcaaactttatattgggatgaatgcaagttttcactgaataaaaagctggtcctcctacttcaacctgtatcacaatatgatgttataaatgtttctttcagtttatcccaagagtatgtgctagtattttcaagtgtatcgacatatagaaaaaatctgaaaccctgatgtcattcattgtttaagtgtaaaataaaaaaaaaacagaaaaaaacctgctttgtcttttactacattcaacatgtgacaaaagaaaactttatcacctaaactttatctatttgtctttttgcagaatagtaaaataaaacacaaaatgcccttgcaagtgaataatctttggaaaacaccttcataaataccatgtattagttaaaatggaataatcatgatcaaactaatgaggtcaaacgaattggtcttgttcctaagtggctaataatgaacatttccatgagcctgttccatgatagcaacaaagggcaacaattccataaacagagaaaagccacatgccaaacatacatgcacgtggcacgtattatcttacacatttttattatccgccacaaaagagtccatgttcattgtttaatacaggcaattgcatcctctagagatcagcacaacaaatgaaggatcaaaacaccccatgttcctcattacaactgtaaattgaacatatgccttcatacaacttaggcagtgaccccagctatagaataaccaactacagtgaggtcttacccctccgaaagtttggttttaattaccttatacacatcttaaatgcctaaatcatcttacggttttctaaattatttagttattatctctgtggtcaatttaagctgctgacaatgcaaatattcccagcgaggtctttcaaggggaagtaaattaaaactagtgtttcatgaggtattacaatttttaaaagactgctttttatggttacaagaagtattagggttggggtcactagtcgaatcaactcagcattaaaaagattttaacatcaggtatataaacactaaatgtcttgatagccatttttttcagtgacataatcaatatgttcagatatcaatggtgtttaagtcaatacctataaaatgttacaagaaaaatatctgttttagggggctttcccactaaggaagacaaaagagaaacactgaaagatggtatgcatgtaagtaaagatacaaacaatatcttatttgctttcctgacaaatcagatactgggcatgaaatgcattttacaattggtgtttatactcatgcagcaaaacatgaaactaaatgctattttcaagtcagtataagcaatcatttctcctcatcttataaagttctgcatttcatcctccagtatctcctaagaaatagtcaaatcagtacatttcaactgcaacaattagcttatctttctctttctcctcattttcaatgccaggttatattaaacagctatgtgatatgtattcccttattagactcacaagaaaatgatagactttatttagacaaatcatctacttcagctgcttcaagtgagtagactccatagtaatgttcgtagagatttttggaggcaattagtattcagaacctggaagtattgttacattctccacatttttaaacatttctgtttctctccacacatataagtattctctcatgataaaattaattatccctaatcatttaaattaattaaacctagtattggaaaaaaactaaacataaggactattatgggttgaagtcctaattcccagtaccttccaaagcggctttatttagaaacagggtcgatgcagatgcaattagttaatatgagatcaggctagaatagggtggacctctaatgtgactctaatctgacctctaatctttatgaaaaggggaaatttagatgcttgcacacaggtagaactgtcttagtccattcaagctgctataacaatattattataaatatagtggtttttataaacaatagaaatttatttcttataattctggaagtctgagacaagggtgccagcttggctgaattctggtaagaacctgcttcctggttcatagatgactgccttctcactgtatcctcagatgacagaagggaggaggaggcttccaggatctccattataaaggcactaatctaatttaagaaggctctcctctcatcacctaatcacctccgaaggccccctccacctcttactaccatggcattggggattcggtttcaacatagaaattttggggagacaaacattcagtctgtagcaagaacaccaggtgaacatgaaggcagagattagggtgagtcttcaagcccaggaacaccaaagcttgccagtaaaccaccagaaactgggagagaggtgtggcacagattctccctcaggaagaaccaactgtgccaacactttgatttcagacttctagccctcaaaactgtgaggtaataaatttctgttgttcaatccatccagtctgtgacactttgttatggaaatcctaggaaactaatatagggcacgtaacttaagaccacagaacttatagttaggaattggtctttcacacctggaatcataagtcaatttaagaattgtttgctccaaccttcatattaacaaaaaatccttaactagctcctaaggcatgcatgtacagttttgcccagtaaatctttacttaatcaacccatagatttttttttggaatattcccatagtcatggggatgccatctgactatggtacacttttcccttaaagtttttgtatggttgtccaaatggccctacacataataggttcgaataactacatttgacttatatctcaatatgcaaattaggtgagtttggtgtaggccagaaaatgcagtgtgaaatagacatgctattgagggttgtgatttttaaaaatacttgaccttctctgtttactagagaaataataaaaaaacataatcagaccattacatacaatataaatctattcatggcagcctccactaacttctgataatttacaacagtttatatggagtaacaccgctcttaatgattttttacacaaaaatgtttgaaattacatgatcaaggagacatgactacaaagtaattgaattggccaacatatcaaaatttatatattcaaataaatatttcccacttcagattagaacattagaagactatttatattactagtcttcatcttagaaatcagatgctctcttaactcttacgccctgccaatgcatgtgtttgatcccagtgactttgtatcctatccatggaagtttatacccagggtcccacaatcatttacagtcctagcttctgtcttttttagccttccttttcccagtataattgcagaattaacttttgagtccaaatgcattactaaattggttcctttcctatgttcctactgtatgcaactataagacaggtaaataataagggtccccttctctgaacaatttagtaaatccatctggaacaaacaatgaataaaacaaaggaatgcttgtgttacgtagccaaaagctacaaggatcttttgtaaatacagtcacatttgccaaatcttctctcttaattatcttatttcttaaaaatgttattgaaccattaacatctacccaggtttaagcaccataattctttaatcaccacctaatgtttcacagactttctaatctatcattcctctttgataaacacaaaaatctcaaactgtcctttaatgttataggaaagtaaaaataaatttaagatcttgactgaaaatctaaacctttgggccaagaacctttgttttcaaattatacttgacccataagagagtctatattcatgattttctctgttaaagacagttcagggcacaacctctccgctattgatattttacactggactgccctgtactttgtagcagggatccttagcagcatccctggcctctactaattagatgccggtaatgctctatcagttgtgacagccaaaaatgtcattaatttggggtaaataaacatttgtataatattgaattttctccaaccacgtacttaatttttcttttcctcaagccttgttatatggtctgcacatttctcattaggtttattgctacgtattttataatcttttccattttgatttttgttttggttgtgtgatctccgttcattatatatttagactaaccatgagtttatgtaattttaagttcacatgggaagatgtattgtctagtgggtacttgggggaaaaatccatccttcgctgataatttactggtgaagccaatcatatctaaaaggttgacagtgctttgtatcttatcctcctgtcttcaccatgtgaaattctatctccattgtgctgttagtagttaaacaagcaaggagctatcagacctacaacaaaatagacctctgtaaaggaaatacaattatggtgggataacccaatgctaggtgattatagaagcactcaacattcaaaataccataaatagactttaagacacaacacagtcctattaccagaaaacttgtttaaaatttgggtgctatatcaaatgcagcacattacttgaaatgtttatctctatccttctattttatttattttattttattttattttattttattttattttattttattttattttattttatttatttattgttttgagactgagttttgctctgtctccaaggctggagtgcagtgggacagctcagctcactgcaacctcctcttcctaggtttcaagcaattctcctgcctcagactcccgagtagctgggattaccggcgtgtgccaccatgcctgggtaatttttgtatttttagtagagacagggtttcactatgttggccaggctgatctcgaactcctgaccttgtaatctgtctgcctcggcctcccaaagtgctgggattacaggcatgagccaccgagcccagcctatccttctactttaatatcttaatcttataagtgagaaaattgaagttcattttacttcccagagcttactgctagataatgaagctggtatcctgactaaaatcactcttcttcccattatatgtgtactttccaaaaaataaaacaaatcagaatgatattctttatagcccaatgttcaatttttcagaaatgcaattctaagaataatgaaagtttttcactttaatgacacatctcacattgtggatactttttgggaggaatagcatgtacttttcaatcagagaaacataacttttaatcccaactctgccaatttctagaagtaaacttagaaaagttacctcattgaaggtaaaaaaagaatgaacaaaaatcttggataatcattcctaacacttgggacagtcattagcattgaatgttatcgta

SEQ ID NO: 1142 - DNA, 627 bp, Homo sapiens
atgtggaaatggatactgacacattgtgcctcagcctttccccacctgcccggctgctgctgctgctgctttttgttgctgttcttggtgtcttccgtccctgtcacctgccaagcccttggtcaggacatggtgtcaccagaggccaccaactcttcttcctcctccttctcctctccttccagcgcgggaaggcatgtgcggagctacaatcaccttcaaggagatgtccgctggagaaagctattctctttcaccaagtactttctcaagattgagaagaacgggaaggtcagcgggaccaagaaggagaactgcccgtacagcatcctggagataacatcagtagaaatcggagttgttgccgtcaaagccattaacagcaactattacttagccatgaacaagaaggggaaactctatggctcaaaagaatttaacaatgactgtaagctgaaggagaggatagaggaaaatggatacaatacctatgcatcatttaactggcagcataatgggaggcaaatgtatgtggcattgaatggaaaaggagctccaaggagaggacagaaaacacgaaggaaaaacacctctgctcactttcttccaatggtggtacactcatag

SEQ ID NO: 1143 - protein, 208 aa, Homo sapiens
MWKWILTHCASAFPHLPGCCCCCFLLLFLVSSVPVTCQALGQDMVSPEATNSSSSSFSSPSSAGRHVRSYNHLQGDVRWRKLFSFTKYFLKIEKNGKVSGTKKENCPYSILEITSVEIGVVAVKAINSNYYLAMNKKGKLYGSKEFNNDCKLKERIEENGYNTYASFNWQHNGRQMYVALNGKGAPRRGQKTRRKNTSAHFLPMVVHS

SEQ ID NO: 1144 - DNA, 177049 bp, Mus musculus
  misc_feature (1)...(177049): n = A,T,C or G
tgtatgtgcatctgccaaccccctgaaggatgtagactgtaccttggccatgtttggatctgcctaggatggaggaggtacccagaaagtattgttgacttaaaccaaaagagggggtctgagcagtttaggcagtgcctttgaagatcttggtaaagaagtgggatgctaccagttgtgggatgtacctaccaccaaaggaacccagagtccttttccccagtgatcagatcagagagacatgacaagtgagaagctttgcacacttgcccaagtgtagagagtatagggacccaggatggaagaccttgaggtggtaaatttggaaagctttaccgtgtgacctagagatagatagtggctggcagatcccacaggtcttctgtacaggggtccttcattgattctgtgtgccagaagatgttttcagtggagtcttttcttggtaaatgaactgttactggcagtctttgtgcatagctagagcttttctatgtacatttgaccccaagccaacccaaacttgcttttataattgcagaatatttggatgtcggtttctgatttcaggttacacgtgattggtagtgggggccagtggctaattctgtctgaatttgtgtgtctgacttgcctttgtccccatgttttggctaaaccttctttggcggtggcttttttttttttttttttttacagcctttgaaagttaagtcagccaacttcttatctattgctgaagtgcaaatcctaggattagtgctgagtgggccctgatggtgtgggtgggacctctgcctgccctgagccaaccgcccagctcccatgccaactcctatagttcttggaatgagagctagggatgcagtaggtcctggaaaacaggtaggacactgtcacctaggggttttgctggatgacagtgactccaataacctactgcatctagaatgactgctctctgcctgttggtaaagtgttcctnnnnnnnnnnnnnnnnnnnngttggtaagtgttcctcgccccccccacctccccacccccccaccactcgcacctcccctccccccgtacctgctgattcaggagactgctctatcagcctcctctactcctggctatgaggtttctcagagaccagatgtctttaaggttaccctgctgacctctccatttgtcacttttgggcatattggggacagcttcctaaggcagacttctctctacctggtggttatagggtctctggactaccaaggggtctcaggacaaagcattgcagaggctcctggagggactgcgtccattcgtatcataatagagaggggcattgtttcacctttgcccctcagggcagcatgtgaccctgacagtatagcaggttagatatagagtgacttatctagttaaggggacagagaatcaggagaggtgaataagcagataccaggattgggctccagggacacaaatgtcatgtaaaatttgtacttttaaacacacacacacacacacacacacacacacacacacacacacacacacacacacgggggcaaggacacactgattattggagccattctttccttgtaaatgctccattaaactacccatgggggacctttaagtgcatactccattggagtctgcaggggaccaaattagccttccctgcagccatctagtttggaacagaggccacctgccagtgcttcacccagtagcgttttactggggttgcactgggttatcaaaagggagcaagcgcatccagtggtacccaggggtcacctttccccatttactatgggacatctcagcatacttatcccacacatgccctgtgacctcaggtgacccagcgacttggagaaacagtagctacttttagttcttgctaccctgtaatgtctgttttggggggtctctgggacctaccagaagctccctgtgaaacccatgtttgaattttgccttgcttaccaggtaacttgtagttatctggctggaagagactatctaattctttctgccctttttccctgtgagaaaaggaggccaaaccaggtcacatgcatgtgaggtctatcataatagccatctgtccctctgtcttggcctctttctcctgtcctcaggcattgtgcccctgcctctgaggacacctgccaccatttgtgcatattctattcaacatcagtagcctggaaccttggccccaccacaaggcacaggtagtggttgatcaagtggccccactcaaacgcaagtttccttcaactgggcaaaaaccaaaaagaccatattagcagggaaggatacataatgctacttagtaaaaatatataatttgtccacttattctcttatagatttgggtgtttagcccactttttcatttacagctattgagtgtttagtaatgggatcagccttgggaatctaatgatgcgtgaagcagaaatgaccccaggccctatacacgtggccagcttttgagagagacagtattagagaggtaatttttaaaccttattttaggctggtaagtattataaatatctatgatgtacaacatgttttagtatatagagacattgtagaatgaaggacttaagctaattaacatacccatatttgcctatatacttttttatggcaaaaacatttagaatctcctcttagcaagttcctaccctattctgctttgttgttactcatgctgttctatggttgttatccttggcttcctcctatccaacagaagtctaatttccttccaaccacgactctctttgcttatttctttgcctttttgtagatgtcacatgctggtgaagtcatgagtatttgtttgactttctgtgcttagcttatttcactggacattatatcctccaggttcacccacatgttgcaagtgatggcattttcttcttgcagagtattttcatttatctgtgcatctccgatggatacatagggtagccctacatgttgaccgatgtgtgcagtactgctgtgtgcttggtagcacccgtctgtcttcaaccttctaatttcattgtctttggtcatttccatcttggagaattgttatatcaaatagtagttccattttaaagtcttggttggatctcattctatttcacatatgaacatactagtttataatctcaccaactatattcaaggattctgtttctccatgtttaccaacacttaatctttccacttttgtctgatagccattgccatcaggtataaagtgctatttagttaggtgcaattccatttgtgtaatttttgtatgtgattatattgtagctgtcttcagacgcaccagaagagggcatcagatcccattacagatggttgtgagccaccatgtggttgctggaaattgaactcaggtcctctggaaaagcagtcagtgctcttaactgctgagccatttttgttgcctttgtttttggggtcatagtcaagaaatctttattcagagtcaaatgtaaagaaaatttactgtttataaaaattaacaatttgagtattttttccagatggttattggtaattcttatgtcatacacacacacacacacacacacatatatacatacatacatatgtatgtatatgtatatgtattgcctacttgtatccttggggggaattttttaaaaatattatattcttgctaatgatttaagttccctatatattttggatgctaaccatttttcagctgtatagcttgcaattattttctttcattttgttagttgtctattattgacacattttctgtgcataagctttctagtttggtgcaattccatttatatattttttgcttttgttgcctgtgcttttggtgtcctatttaaaaagtcttggctcagatcaaatggaaagaaattttactctgttttctcccagtaattctacttagtattttaatgtttaagtctttgatccaatttgtttggctgtgtatgtgttgtaagataaagagcatatttcctgcttttgcctatggatgcccagttttaccaggaacaattttttaaagatactgttctttccccattgtgtgttattggcacctttgtcaaagatcagttggttgtgaatgtataggtttatttctataatctttggtagaggggtaactttttaatgaattggcagtatgaattctaatagaatttggtaggatataacagtgggctccagttttgtctgggaagtcaataaaggttttgctgagaaagtattatttaagttgagccttgaaggataggtaaaacttatctgttaaaatggagtggaaagatgctatatgaagaagaaatacatgtgaatggttgcactctggtccagggtcatgcatggcatgaattggtgactgagtgcaggctaggagacaacagctatgataggtgtgtgctctatgcttccccactctacagcacaaggcttgttttctatcctcgtgtcatgaagctgtagcttcactctaaagagggaagagtttatatttggaggcaagaacattgggttcagtggagcaaacgaggcaaagacatggtgcatgcatgtgtgagtgaaataacagaccggtgtggtgcagagtagagggttctcatagataggaagcaggaaagttggagagacaaactgtaaggtagagagatataaggatgactttaaccctgggctgcagagaagctaaaatttgaggaccagttatttattaattctagtactgtgaacagacatcatgaccaaggcaacccttatcagagaaaacatttaaatgggggcttactgatagattcagaaattgagttcattgtcatcatggtagggatcatggcagtgtccacgcaggtgttggaacagtagctgagagctacatattgatctatagtcagagagagaaagaaagccactgagcctggggtaggcttttgaaatctcaaagacttcccccactctagtgatacatttcctctaagaaggccatgcctcctaatccttccaatcctttcaaatagtgccactcactgggcccagtggggtcagtcgtattcaaattatcacaaggtaagatggaggcagcctttatatcagggagttgactgttttactttagactttgttttagaaagaatttataataacttagatccttgttgatacatatcctaggatcaaaaattgttgtgttttagttttctttatgtttgatcgcattactttattcttcacctttttccttcactgtttttctagtagcacccatgagtattttatgcatgctgtgtgtggtggtaggtcttagagttatacggacaataaggaatgatattcaaaaacagggagctagtacctgcacacacacacacacaggcatgaatgggatagcttccttctcacaagcaaggaaaaccttctcaaagacatgggcatgtgggtggatgagcaaagccaaggggcgagtgctcttggcctctgtagatctcttgagggctctaaggttagttactgaattttgctaaggaggaactagctcaggatggatgaatagatggatgcatgcatggacaggtgggtgggcatgtgatagacatatgaatgttgatgcaacaacacacagtaaaagaatcctgaagaaaagaaccaagtattctggaatctttcagcccctgctagatgacagtttttggtttcttaaaggccttttgtagggtgaagtggttagacactgaaaataagttcagaaaatgttgacttagagactgtcccaatgttcagatcactgtttaaaaagatagaccattagattttaggactgggggaatggctaataggtaagagcttgtaagtgggtaagggtaagtaagtataagcagggaaacccaagtttgatccccagaaccaatgtggaaaatctaggcaatttgatatgcactcgtgttcctaggaattggtaggtaggtagagatagctggattcctggtgctctgtagctagcaagtcccttgatatgttctaaaacataaaacaaggtgaacagctcttaagaaagagtaacacttgagattggtctctgacttccacatgtgtgtgtgtgtgtgtgtgtgtgtgtgtgtgtgtgtgtgtgtgtgtacactgcacccatatgtacatgcatccacaacaaacccacagccatactacaaagaagaactagatttgagcctatatttccctgatagtttaaagtgtcataggagacttggaccttatataaagtgcccttctaaagggaagtttgactggcattgctcaataaggtcctctgccagagaaaagaaagcactgctgggggcagacagagaggattggaatcatggagtcttcctgtttcacagggtgggtcacatttgtgatacagcttttgatctggctttgtgaagaaggattagctcatttcgaatctagaatgttctcacctgccccttccccaacttctcctgtctttcctttgctgtggcacagtcttggttttctcttctgtctctgctacaaacttctgtgctgcaagtcatttggcttctgtacctccaaactctttttggtgttttctggcttccttcttaccttccttttcaaattcattttttttttcttcaaataaacaatccatttgaagggggataattgtcatacttcctcaatttttatttgaccaaaataataataaccctcaatttgtttaatgtagaggtactcttgtctctcaggagtctttggcaatgtcagaattgaggaatgaatgtccctagtttataggacaactggtctaccaggttgtgcttgttcatttggcatttgacagaatttctgtaacaaccatttttatagcaagcttctcttttttataacgcattccatcaagtaattcattaaagattttggaaagagggaccaacattttttaaaaggagggtgaggtgaggaagggaggattataaaaataaacccagacccttcaaccattcagttacactaatgtccctcatattattgtggcacagttacttataaataaaaggcagagtgtgtttggtaggtgtactctctgttctttatcttgtttttctgctctgaagtatggtgctgtcttgacgtagggatggaactgctatgaatattgatggcatggcagccaaagcttttttcctgtctggcctagtaaataaagctgagaggatgaaagagaagaggaattttcaagacagtgtgctgtttttagattatcttgttcccttagaactaggagtcttgaaaacatattgatgatgtacatttggtggtaggggcagctctgagtaaagtaggtggatatttcagaaatgtgggcctctggtttaaagtcacagaataataattcctcctcctcctcctcctccttgtcctttgagttttttagagtttgtgctccttcttggatctctacacaccttccagtgaatcatcaaaccctgactctcactgtattaattgtattgtgaattgggtgctgggtggtgtgtcctcatgttcctatgaggacatccactcaaagatacagcaggaggaggataaagaacctgggttgtaaacacagcagcagccccgtgggtctgcatatgacctgtcaggtcatggtgcataggctgccttgggagcaccttcaaggcggcttagcccagaggatctgactgtgtgaggggaatgggggcaggggtgggaaggatgaccagatggtggagggaggggtacacaggatgagccagcagagaactgaatctgttcgaaggaccaggaggcaggaataggtagggattgggtatgagttagtgctttaacatcataagcatcctgattctggttaactcaaaagaaattcttagactgttgtgatgctcttccaaggattcacagagcactggatggcaggtttagaaattacaggagccagggctggctaggtgtctttgcaggtaggaatgcttgttgccgagaccaagacctgaattcaatctccttatcaaatacagtggaatgagagaactgatgccttcccatggtctccatatgtatatgtacatacacacacacagatgcacatgcatacacacacatatacacacatacacataaacatggatgaacatgcacacacacatggatgcacatgcacacacatacacacacatatacacacatgcacatacacatggatgaatatgcacacacacacacactgaatgttaagggcccagaatgttctagggttaaggtcggcaaaactgatctggcttttctataaccaggggggagtaaacaagatgggtgctgtcttggatgcacaggctgcagttggttattaccctggtggcccagagggacgatgctggtgacaagccatgagaaatctctaccctaggacagccagagacaggagccagctgtctagccgcagaggcctgcatcctagttgtagtgaagacaacacttccattgaaatgcagaagaggctgtagctactgcaagccaatgtgtgcgtagacatgttacatttttaggaaggcaggcctgttggagtcatcctgcaatgaatattttaaaagaggatttccaaaataagaagttcctatccagaagcatttccttttaacagcgtacatttccatttataaatccacatctacaatagtggtcacacagtgtctgccttcttttgtgtgaccatggggaaaagaaaggacccaggagctgtggccaagacccttggcttcagcacaagtaggggagtgctcttatgctaactctggattttagaggttctctctgtatgtgtttaaaactcctgtgaacccttccaggccattctttgcaaggatgggactggagttgggaagtttttaaatgctggttccttctggggtacctggcatatggaggaaaagctcactgtttcctgagccatagttactatagccttctgtagtagccatgttagtaagtgaagtccattagtctaccctaaggatgatagtagctgaggactctagagcccacagagaaaagttctcattcttgagattttgttttgttttgttaagtaaattaaagccagagaatgctggttggatactcatggccctgtccattgagtttctatcaaatttatagaaagagcctatgtgtttagacctgttgactggggcatccttgcttggggggtaatgtgggttggagttggagaggttctagccatcaggcaatgctgcagatggatgtggcaatcagatgggagcagacatgggaactgagataaaggcggagctgtatctccaggaggctggttaggagggagtccatcactggtgccagccaggaagaggagacaggccagtattaggcatctgagatccctgccctcttctctgtgctgagggcagtcagatcagaataagatgtcagaggaaaacccaagaaaaaaaaataagggtaaagtccattatgcatctgttctcccagacggtgtgttctgtgcagaaaccactgtcagaatgcttgtttcatcctggtgcttttctgggcctgatctggcaatcttggagaaaacatgctgtgttgtgcaaatgtgtgcaaatagaaaacatgcccatgatgtcccaggcaggctcactgctcatgcatcagggcaggtggcaaaatgcagtaatgcagcctggaatgacagtacttaacacttagctgcttatgagaaattcagcatcaaaattgaaatgttttcctggtccacatgcagggtagtgattctagttctcatgataacattgtctgttatcatgtctgtgcgtggtggggggggggtgcttctgtctctgagctattgattctgatcattgattctttctttctccacccttggtgtgttcctttctctttacaggaaaaagtagaatatgccttcctgattatttttacagtggagacatttctgaagattatagcgtatggactgttgctgcatcctaatgcttacgttaggaatggatggaatttactggattttgttatagtaattgtagggtaagtccttggtttgggaaaaacgtttatctgggaatggaggtgagggctggatggtaaagggaacacaagccttcttgggggaggtggttattcttatgcccgtgatggcatcaggatctagcaggggttcttttaatgctgacagggctgctgtcaatccctgggcagaggcctgggtgaagagctctcatgattggtgtgcttggggaagtcagtgacaggctgttagaggaagtctcagccgctaatgagagatgattcacctcacagggcctcaagtctccacaaatagacctgcctggttggtgggtggagtcagtggtgaatgcagctcctaaaagctagcaccctgctagttaaaaccatgtgtatcatacgagagagcctttcttgctgtgcggtgcgctgctgtttaacatcccttgagcagagctattatgtttttatgctgagttgtgggagaaaccttggcatgccactttcccattttaaataacaaaacaagcgtctgaataatgtcacatatctggcataaaataaaataaactggaaaatgcagagaagcaggtgttcttttaataccctcttgtgagaggaagacgctggtagatttagttaaaggagtatgttacaatgaaaaatagaggtctgtgttgccccattccttccacaccctgagttgttgccagcagaggaaacacaaatcaggtctttggagcaaacatccaccaagggagacaagatgtagccctgttttgggactccttacctgggctgttctgtaagttacccctaaaattaggaatactctcttatttccatcaagagagctcttaaaagatgtatttgtttttactttatgtatgtgattatttcacctgcacatatgtctgggtacttcatgcatgtctagcctccatgggatccagcagagggtgtcagatccctcaaactggaataccatgattttgagtcactgtgagggtgcagggaatcaaacccaagtcctctgtcagagtagcaggtgctcttcactgctgagtcctctctccagtttggagagagcttttaaaaccatctctctgccttcctctttgtggctttattcagttgctgtttgcaggtaacttgcagcttggttatcttctggattatctgtatcctgattgcactggtttttcattggagatgactttttctgtctgtttggagagtagcttacgtttggtggggtgtccttttaccccggggaatgaaaataaggaaggcccaaagtggtggcccactggatggttatacttaccaggaagaaagctagcttttataaaacctcccattgtacattggcacctatgtgtgtattgcagaaataatgtatccaaaatgaataggtggcagataggcgttaaggcagaagcctcctcttgtttggaacacctgtcacgggctggcaaactggagccgcagatgtctctttgttctgggagagtcttgtgctttcctgccactggacttttattagactagagaatggagatacatagcttcacttcttatgtccccatgtcaccttagctttttctctgctggaacattttgcccaactagaacagcacaggaagagggaacagagccaatatggcagtcttaccaagtttaagagataaaactccaggagacctgagtaacacaaaatgggaagggagagaactagttgagaactggagagaggagagccctgcacctgggccttgaggtccacaggagtctcagctgaaactgagctgtagtccacgaggccaagcaaagaagtgttaggggaaagagaaagacagggtgcaggaactataagataaataataaccagtttcctaagactaaggggtgtttgtgatccaaatacccagagtaaatcactgtattgaacattgtggactgttaataaactgaagggctttttgtagtagagtcagcctagatctagactatggcttgggaaaccatgagcaggggatcaaatcctagctcatctggcctgccactgatttttataaataaagttttattgtaacatagctgcactcatttgttgtcatcattgaatggagaagtccactgtcttggccctttattgaaaaactgtgctatcccttctgtagaataaagactctttgaaaacagtgttttgagaatgagcctgaaggagagagaactgataaacaagtaacttaattacatgtaaaaatgaacaaacaaacaaaaaccaaaaaacccctaaacttttcaaaggaaaaataaaatctaaatacttagatgatcattctaagtacctcacctgcactgaggtaatactagatataagagggagtgtgacccctaaaaggaggaaattctatgactagaaatagacccagaagttacagagacaatgcaaggaacttcacaggcatctaaaaacagcaattacgaatttgttcgtggatgtaagggaacataagactatagtggagaaagatggaacaataaaaaagggacacatgagacttgaaggactggaaggtgtgtctgaaacgaaaacattccttagatttgctcactagtacatcaggcagtgctaaagagaaacacatcaggggatgtgaagatgtggcagtaaataaataattaaggaaatgaataccacctcacggacttgtgaattaccaaatgttctaaagtgtgcatttggaatattaggaaagaaagactggagagatggctcagcagttaagagcactatctgctcttgcagagaacctgggtttggttcccagaacccatgaggtagctcacaaccatctataattccaagatccaggggattcatgctcttctggtgtctgtggatacctacacacacatggtgcacataaaacacatacaagtgtgtacatatacacacccaaatataccagtaaatcttgttttgaaaggaggagagagaaaaagaaagcccctgaggaaatggttctaaatgttccaaataggatggaaaatgaactcagaagttcacgatgcctggcaaagcttgatcagaaaccacagagaaaggcctatcacaaccacagtcaaaagtgcttaaaaacaaaacaaacaaacaaacaaacaaaaacaaaactcatgtcaggcctttcaagagctgtacaagccagaagacaatagacacaccctcagaggcctggggaaatgtcagcttagagtctcaaccagtgaaattccttccaaacccaagtcaagatggaaactgttatagacaaagcaaagtggaggctttatgactgacagacttcttgcacctctaaaaatgcttaaagacagcttttcaggttgaaataaaaatgacaccagatagaaatgaagagccacccaaaagaaatgaggtattccagactggatggatttaacgatatttattttcattttaaaatctcttttaaggtaattatctttaaaaaacaataaaataacatcaataacattgtgacatgtctaccttacagtagcacagaggacagagagagcattgtaaggctgtcgtacaatgtacatacagaacctagaatgttaagatgctgtatgaaggtaggtcatgcacaagtaaaagtacagattataaaccctggcacccagacttgcaaactacccactctccactccagagcctagagatggctctacaggaagccatttctccacactagcaaagtattttgacacctattttggcaactaaagttgtattgaaacccagctatacttgtatgtgtagctgtttgatctacttgacatttaatgaccaagttgatttgttagcccagaggtccagcagtctgcaaatccgaaaccacttcctctctcccttcacagaaggctgctgttgacacttttcctactgagcaactgggaacaaggaactttagttgttgatatcaagacaacaaaggagagagacacaacaagaacaaaaatcaagttaggaaaaagtaaagaaaaaacaaagtaaacagaaaacaaataacaagatagaatgtttaactcagcagagccctaattaatccatgagtttatcagattatcagatgtaaaaaaacaaaacaaaaaaacaaaaacaaaaaaacctttccagtgtctctttaaccttctctaatgcaaaagcaagtaatttgtgaatcaaagcacagaaaaggcagctagaggggccatatcaataaccaacaaagtagacgttagaaaaaaggagctacccagcatgcaaagtgagagatttcaaaaccataaagggtattttccaagaagatataagaatccttgttgttcaaatgtctgataacagagcttcaaagtgcttgaatgaaacactctcagaactgaaggaggagtggaaggccatctttatagctgtgtaccccagttctcagtgctggagtatggctagcacctgtcgatgggggacctgaaaaattccagcagtcaccctgacctttccaaaggattccctatcaataagagcagcatacatattcttttcacatgcatatgaagtgttcatcaagagagttgatattctgggccataaaataaatcatagtgaatttaagactaaaatcatacagaatcgagttttctgaatgaacctgacaatgtttctggataaaaaatctctataaaagcatagaaatgtctatatattagccacaggcagttagaaaacaaaacatttaaatgttactatttacagtgtcaccaaagctatgaaatatttaggtatggatagcttgctgaaatggggaagtcttcacgggagcaatcaaagaagagctgaagaaagagtatgacaccatgctcatgggttggaagaattaatgaccttaggtttctacttcttcccaaatcaaggtatagattgaatcctaatctaaatattgtcaagcttttgaaaaattcacaagacttttctagcatctgtatggaaattagagagactctaagttggccaaagaaatctttaagaacaaagctggagcctgatcttatggcatgctctagtgttattggagttgagataatattgatcttaggagttgacataaagatcaatggaatcaaatagggccatctagaaatagacccatgtgcatgccaccaattgattttagaaaaagatgccatgatgattcaatggcatgaggaaactttccagcaaacagcgtggaaacaaccatttgtcagtgtgaaagactagccttacctcagactgtatgttaccttcatccagatcatagacttatttacaatttaaaactataacatttcatggggcaaatactgtatacagcctgtaggcaggcaaagctttctaaggcataggtgctgtcagtgaactccttaaaattcccatacaagtggaggaggctcagaagatgttcagtcaagatgtagtgagttcgaggccagcttgggacatgtgtgatcctatctcaaagaacaaagaggcagaaaacagcacctatcaaagagaccatgaaaagattaaactctatcaaaacttaaatcttttcttcaaaaattagtgtgaaaaaaaatgaaaaaagcatttcccatagggcaaagagtaaggaaggaaggaagtcagttagttcttggtctaaaatatatatatatttggcatgcatacagacaaaactattcaagaatagaatatactaaaggatgggcaaaataactgagtggatcttcattttaaaaaaatggctgtccaacaaaaccctcaacattgttagtaattaaagaaatggtaattaaaaccacagtaacagcactgtgcctaccgggactgctggttgtaaagagaacagatatatcaaatgggagccaccatatggggaaattgaaactctcataaacctcttctaaaactggaagtgataacaccccttagaaagattcttgaggattcttccagtttctgtctgcaccaggagctgttcctgtgccacagcattctatacccaaataccatagcagggagagagcaaatctcccaggagtgctgacaagcctgtgagcacacattagaccaccgcttctgttcagatagacccaccaggagccctcaggacacatgaaccaaggaactgccggggacaggatacttccagtttctgtatgtgccaagagctgatcctgtgactcagcgctccatacccaaataccaccgggggaaagctggtctcccatgagtgccaaaacaactgtgagcacaggtaagaccaccacttctgctcaaattcctgccacaagagggacccacccagagccatcagaacacaggaaccaaggaacagccagggacaggatccttctgatttctgtctgcactccagagctgaccctgtgccacagctctccgtacccaaatacctccctaagacaactgatctcccagaagtactgactcacaggcttgcaggagggacaaggcacagtcagagacagcaagaccagctaacaccgcagataaccagatggcgagaggcaagggcaagaacctaagcaacagaaactaaggctactttgaatcatcagaaaccagttcttctaccactgcaagccctggataccccaatacaccagaaaagcaagactctgatttaaaaccacatctcatgatgatgatagaggactgtaagaaggacataaataactcccttaaagaaatacaggagaatacaggtaaacagctagaagcccttaaagaggaaacacaaaaatcccttaaagaattacaggaaaacacaaccaaacaggtgaaagaattgaacaaaaccacccaggatctaaaaatggaactagaaacaataaagaaatcataaagggagacaaccctggaaatagaaaacctagaaaagagatcaggagtcatagatgcaagcatctccaacagaatgcaagaattagaagagagaatctcaggtgcagaagataccatagaaaacattggcacaacagtcaaagaaaatacaaaatgcaaaaagctcttaacccaaaacatccaggaaatccaggacacaatgagaagaccaaacctaaggataataggtatagaagagagtgaagattcccaacttaaagggacagtaaatatcttcaacaaaattatagaagaaaaattccctaacctaaagaaagagatgcccataaacatacaagaagcctacagaaatccaaatagattgaaccagaaaagaaattccttctgttgtataatagtcaaaacaccaaaggcacaaaacaaaagaaagaatattaaaagcagtaaggggaaaaggtcaagtaacagaggcagacctatcagaattagacttctcaccagagactatgaaagttagaagatcctggggagatgttatacagactctaagagaacacaaatgccagtccaggctactatacccagaaaaactctcaattactatagatagagaaaccaagacattccatgacaaaaccaaatttacacaatatctttccacaaatctagccctacaaaggataatagatggaaaatgctaacacaagaagtgaaactacagcctagaaaaagcaagaaagtaatctttcaacaaacccaaaagaagatagacacacaaacataaaaataacaggaagcaacaattactattccttgaaatttcttaacatcaatggactcaattccccaataaaaagacatagactaacagactgggtatgtaaacaggatccattattttgctgcatacaggaaaggcagtgtcaaagacagacactacctcagagtaaagggctggaaaacaattttccaagcaaatggtcccaagaaacaagctggagtagccattctaatatcgaataaaatcaacattcaaacaaaagttatcaaaaaggataaaaaaggacacttcatactcatcaaaggaaaaaaaaatctaccaagaagaactctcaattctgaacacctatacttccaaatgtaagggaacccacattcataaaagaaactttactcaaagcacacattgaacctcacatgataaaagtgagaaaattcaacaccccattctcatcaatggacagataatagaaacacaaactaaacagagacacattgaaaataacagaaattatggaccgaatggatttatcatatatctatagaacatttcatccttaaaacaaaagaatataccttcttctcagcacctcatggtaccttcttcaaaattgaccgtataattggccacaaagtatgcctcaacagatacaagaagattgaaataatcccatgcatcctatcagatcaccacagactaaggatggtcttcaataggaacaaaaacaacaaaaagcccacacacacatggaagctgaacaacaccacactcaatgataacttggtcaaggaagaaataaagaaattaaagactttttagaattcaatgaaaatgaaggcacaacatacctaaacttgtgggacacaatgaaagcagtgctaagagggaaactcatagctctgagtgcctccaaaaagaaactggagagagcatacactagcagcttatcagcacacctgaaagctctagaacaaaaagaagcaaatatacccaagaggagtagaaggtaggaaataatcaaactcagggctgaaatcaaccaagtagaaacaaaaagaactgtacaatgaatcagcaaaaccaggagctggttctttgagaaaataatcaagatagataaacctttacccagactaaccagaggtcacagagatagcatctaaattaacaaaataagaaatgaaagggagatacaacaacagaaactgaggaaattaaaaaaattatcagatcctactacaaaggcctatactcaataaaactggaaaatcaggatgaaatggacaactttctagacagataccaaacaccaaagttaaatcaggatcagataaaccatctaaacagtcccataacccctaaagaaatagaagcagtcattaaaagtctcccaaccaaaaaaaaaaaaaaaaagcccaggactagatgggtttagtgcaaaattctatcagaccttcaaagaagaccgaataccaatactcttcaaactatttcacaaaatagaaacagaaggaacactaccatgaagtcacacagttacactgcgtattctcccttgaagatggaatagtttctgtctaatcaggaacctgtcacaatttcctttcatagaggacttcttaagagatttttttttttacttctaccatatttaatgttccaaatagatttttaagactggttgagtgcatattacttttagcttcagaagacatcatgtatatttaagaggcatttaactattataaattattttgatgacttaaaacaatgtcaatattgagtttgtttattaaaaaaagaaattaaaaaaaaaaaagaaaagaaagattctttcccccctttccttccagtattataaactagttttctggtacttatccaaggaaaaacatatttctatagaaaaattttattcaaaatagaggaaaaatgaaaatagcttaaaaccacagagcaggtaaattgataaaaccatcatggcatgcttaatttaatattttatttaacaataaaagaaactaataaatgtaacaacttggatgaatctcaaaaaaatatgacaagcaaaataagaatatggtgtggtttatttatatagtctttagaataggaaaatacctatgtagatgaatagcctgcccatcagtagcagccacattcagggaaggaagctgcacaggggtcctagagacagcagactcatctgtcttgacagtggttgtttgttgaatttcctattgttgctgtaactcagctaatttaaacattaagcaggtgtgttttgcatttgtaaaataaactgcagtgaaggtggttgtaagattaaagtagcaaggtagggctagagccaatggtatttctgttagtacaaaaagaaaccctcacattttatttatcaaaaatattaacctacttcctaccaccataaaagaaacatatgaagtaaaacttttagtaaagtatagttgttcatggcaagagcagaagaaaaattataaaagaaaaagatcaattacaatgtctttctttgaatctaattcccactcactaaagtttccatctatgatctgtttttctgtccaatgagttttccattctgagtccatagtgacctgttacttttgtcaaaattcccactaataaaaaagacattaagagagttgcatgtagcccttaatgtggacacacaaggaccaaggggtcttctcttctcaagtcgcttcctttaaagaaaagctggtctggatcaatcctacccctacccctatgggttcttagtaaggagatattttaggcattcaagattgtcacttaagctttggtaaagaagaatatggcgtccccattctggttcacctggcttcggtcagttggatctgtccttttcttctcttggggtcaagttttattaacagcctaggatcttccattgctgcttccttctcctgtctatatctgttcaggcactgaggtacatggtgctattattattattattattattattattatgaggaggaggaggaggaggaggaagaagaagaagagaaggagtgagagagaaatagaacataggatttgagattcttaattaaattttcttgctttactgagaaggaaactgagacctagagaagggaggcttccagcccacaccaccttgaagtggtggctagtttctcttcctgtctcagtctctcttgtagtggcagagacattatgcacctgctttcaatgaccctgctaaaggatggggcgtgagatgactgtgatccacattgcagaaccagcaatgcttgagagccatcttcagtcaccgcctgcagaagttgctttcctaaccctctgggttgaaaattcctgtggcctccacgtttgcagagttcgaagtttttcctttttcctttatttctctgaagctgtgaacttggttttgaggggagagacttttagcattagctatgctgcaggagtttacagtcatttttagaagccgacataataagaaacctgccatagccttgatatgtctccctagtcagagctcaagctagcccttagtagctttgtaaaggtggagatgcggcctattccccgttctgggtcttgttcattgctgggctgttattaaaacaaaggagtatctataaatgccctggagtgacagagttgtgcccaatcaggcccacaatcagaccaccctgtgttttatggacctagtgtcttggtgacccagaggcctgtctaaggggggtgcagaatttctgctttggctgctaattaaactttagaaaccttttctttgttgctgagccaaccattcccacaatctgatcggcccaagttgatgctatttgcaatgggcaaatttatatttactctttaaaaaacgagcaaccattccaaagaataaatatttatttaaaaaaaaaaaaaagcaaaagtaactgtcaaatgggcagaccgtccgaaaatagcgttattcggaaaaccttccaagagacggaaaaaacttgtcatcgtggccagatactactttactcacatttcagaagagaaaatggtgatattaatgcctccccttaggtaactttcagcctctgcacactgcagctctttggcacctgtgactcacgttgttttgcacatacctcaaagagggtgcaggtgggggctgtctgcctgcactggagtgctgtggcacattaaggtgtggaactttgaagccatccatctatttccgaatcaggacgtttcttgtgaactttgtgtgtgtgtcaggaactgtaaactaaaacagatgaacagaatggatgaaaactccctgtcctaacagacccttcagcctcatcagccacaacacccggaagcaagtttcagctctgccactggtggcctggctgagcagctgagcctcgcccattagctttgctttcacaagcatgtaaaggtcttgatgatgcagtaggagagtgcttttgagaagatgggcacagtgacagatgtgaggtccttactacatggctcagactcacaagccatgaccataaatatcactgtcatgaaggtagtagcctctgcccctaggatcctcagagggtccctgcttctggacactttgttggcatgaacagaggggtctgagcagcctctgtctgaggtcctgtcaggtagcagggcaggctggggttccatagcccggttctcagcctttgcttagctttcttttatttagttagcagccacccagaattagcccttgttcaaaaataactactattattatcctgttttgcttacctgggtgacagactaacatttgtttctctcttcctctttcagattgtttagtgtaattctggaacaattaaccaaagaaacagaaggcgggaaccactctagtggcaaatcaggaggctttgatgtcaaagccctccgtgccttccgagtgttaagaccacttcgacttgtatcaggagtgcccagtaagcacattttgcctcctacccctagaagtactgcctttcccccgttgggtgggtcctgggatcaggaaagagtcctctgggggaagttgccctgttccccagtaggggcccagtagcagcaggccttctttgatgctggaatactgaagcttgcaccattcatgtggatctctgattccagagtacaggtggtgtttattgtcatctgcttttcagctgaagagaggctgggtggcagttggagacctgggcttctagcctcctgtttcctgtttagttctgtgctctgatgatatccagtggttttcttccttctcccgagcctgcctcaccttgtagtggtagctgattggaagagggagggctgttgaataggagcaacagggtggctagactttggctctacagctagtgatgacacttttctgagaagggatgtacgtgtcagtttccatatgtcagccagtgcctggccctgcttgcctccagagtctgacctctggtcaagttgactctcacctgggctgggaaggaaggagcttgcttaagaagcctgcctggcctttgcttcgtgagctctgcccttggtaaaactatcttttctggggccgtcagagtgtggacacccttgcgttgtgcttctgaacaggtaggtactcagtactcagagctggagcaaggatggaggaccactgggtacacccactttccacagctcataaagccctcagaacaccgactcttttcctcccagaatgtcctcatgaagttttattaaaccttaggcactcagaacgcaccaaacccctctggaaaagaaaatactacgtttccaaatttaacatttaaaatgtaggaagtggtgttttaagtgtacttatttttccagatggttcatttattttcattgaaaaagatcagcgcaagtcaaaaaccacagaactgtctggaagcaatcaagagaaacagaaatacgttggcagtggctggcgccattaagtgtaacacgatgaaatggggagcttactgagcaaatatgctccttcagattgagttgtcacagcttataatctaatttcaaagtaatcacgacagcctttcccctaaagagcaaatgacaggacacctgactgtggcgtgtgctgcgtgcagacatgtggcacgtgctgcgtgcagacctggagctgcagcttatgcgtgcatgagtggccctggccagtgaaaactcttggaactggcctggccttggcttccttgggctgaggaggtttccaaagaagggttagtactccgtaaaccctgcagaacagctttctgctctttcctcctccaagacacaaggctgtttgagatctgtggtggtcagagagagaaatggcgctctgactgtaagcccatcttttaggtgatcctgtcaaggaacgtgcaggcttggggagaaaggaattgaggcttttgaggcatgctgtttttagctgcagacttggtgatttttttcctccggcacctgaaatcattgaaaatatccaggaatgtttgtctatacttataaagcattgtcttctcattccctgaagattgaggctattctatatgggaatatatatatacatacatacatacatacacacacacacatatatatatatatatatatacacacacaaatatatatatatacatatatttatacatatacagaaatacatatatttctccccaagcctgcacgttccttgacaggatcacctaaaagatgggcttacggtcagagcgccatttctctctgtgaccaccacagatcgatcgatctatatatatatatatatatatatatatatatatatatatatatatatagagagagagagagagagagagagagagagagagagagagagagaatatcactaagggaaaaacaactgcattccaaatcatgtagaattattttttaaaagttactattttttttagtttcgtacacacacacacacacacacacacacacacatacttgtgtgtattcaggagcatgtgtgccatggcacacattgcaaaggttaggaacaacttgcagaagtcattttttccctttcatcatagaagctcccagggatcactcaggtcaggcttagtagaaaacttatttacttgcagagccatctccctagaacagggcagtggtggcacacgcctttcatttcagcactcaggaggcagaagcagaggcaggaagatctctgtgaatttgaggccagcctggtctacagagtgagttctaggacagctagggctatatgataagagtcctgtctagaaaaacaagagcaaaaccaattaatattatttaaaattgtgtgtgtgtgtgtgtgtgtgtgtgtgtgtgtgtgtatgatttgtggactttggtgaatctttggtggcttatattctattacctggtaaaagtttatcagagtctaagagcaccaggcatgggggtttacattcttaaacccagcactctgtaggcagagacaggtggatctctgtgacgttgaagctagactggtctgcagagcaagttccagggcagccagggctatatagcgagaccctgtctcaaacaaaagaaagaacaaaactggaattcatgaccataaaactaggcaagagcatggtagaacgtgtggctagctctcactgtctctcagaggagttcagaaaggccaatgaggaggtcacaacttttgggctctcataactgaaggggagccacacagggtctccttccccctgcatggcaccctttcctgcctccatggcacgcgtgctgagtatgtcccaaggagcatagtgtaatgagagcatgtgtgttcagtttgagatgaaacttgacattctctcataagtttggccaatctgaaatacagtaggtacactaaacatcaatatattcctgagaccagtggtttactgcagtagagtttaactcttaggtgatttggaaaggcccattcatgtctaaaagaagaaaaataaaaaagaaaatatcaaaatagtagccaagaaaccctgtctgtgtatatgggagccagtgctttcccctcacgctcgctgcctgcaacggacaaaaaccatgaaaaatcgtctcatcagtcttgttttcaagagaaaccatttggacatttaaagacacatttaaagaagtctagccacacagaagctgtagggagacagtgtcatgctggccaggaatcttgccaggcctccctgctgcctgccccctgcctcttcccactagtgctcaccaagggaggcatgcccctgtagctgtgggggtttctttcccttctcttggctcatcccagctgctgctttgttttaactctagtatctcagcattgtgtgtcccttctttctctgaataaatgtcgggaaagttaggggaagaaagacaaaggactctgaggccatgagaggtggggatggagcttggtactaaccactgagcctggaagccccggttccagtgcaggctctgggcgccctcctttccttctattctaattcctcactgttctatgtgtctgcacctgccccacggtggctctgagtccctcgtgtctcaagatcacattttagctacaggacacctgcattctaatattacactgagcatccaaacccaaccttcctaagtcactcagccttctgctgcccctgcttgccgcctccatcctagagggaccgcctttagaaacacggagggatttttcttttggggtctgatgggggacagctgtaatttgtccctgaccctgggcaagatcactcaccctttcctaaggtactttcccttcatcccttcttgcagttgaagttgggtcccaggcttctctgaattccagcctctctagagcctcacctcttcccagtcctttgtccatgtttcacaatgattgctgtccacttgctttctctgaggcactttccctaatagactcaggtctgactccagacccaaattcaaacccagaactacatggatgtgaccttctctttgtaggtggcctttgtgactagctgtgatgaggctcaccaccaccccagctcacactgtgcactgcttctgtgatggttctctgcccaggtcttcctgtggtagtctgtctttaggctcagaggaatgggaaactacattcggtcctctgtccttatcctgtactgagacagtgttttcaatcctctttaattttctgttcgctgttgctcagagtgctagcatactacctgagagtaacatggtaaactctcatgttcccttctagactgtaacctctttgagagtgtccctttgtataattcatctttgtattgctcaaggcactaaaccccatgctttgcatgtagtaaatattcaggtgtgttttgttaaatggatacagaaattagtgcatatgtgaatgcatgattttaatgctgtctacacctctctgggtcttggtttttctatctgtctagtgaaggagttggactaaatgatatttaggagtccgtccttagatcatttcctattgagggttagtattaattaacagctttgaaatagctctaaattttattactgtatgtcataaacagagcaagcatcattaggaattatatttatggctcctttgaagtgtcattttaactcacaagtggatttttttttctctcctaggtttacaagttgttctgaactccattataaaagccatggtccccctccttcacatagcccttttggtattatttgtaattatcatctatgctattataggattggaactttttattggaaaaatgcacaaaacatgtttttttgctgactcaggtgagtagtgacagttttgtgctttgttctggaggaggtgttggtcccctgagcccttccctaccatcgatttcctcttcctgtgtgaattatgttgaggatggcttattctgattttccattccgatttcctatgggaaagtatactagccaataagacgggggccctgtacaaggnnnnnnnnnnnnnnnnnnnnnnnnnnnnnnnnnnnnnnnnnnnnnnnnnnnnnnnnnnnnnnnnnnnnnnnnnnnnnnnnnnnnnnnnnnnnnnnnnnnnnnnnnnnnnnnnnnnnnnnnnnnnnnnnnnnnnnnnnnnnnnnnnnnnnnnnnnnnnnnnnnnnnnnnnnnnnnnnnnnnnnnnnnnnnnnnnnnnnnnnnnnnnnnnnnnnnnnnnnnnnnnnnnnnnnnnnnnnnnnnnnnnnnnnnnnnnnnnnnnnnnnnnnnnnnnnnnnnnnnnnnnnnnnnnnnnnnnnnnnnnnnnnnnnnnnnnnnnnnnnnnnnnnnnnnnnnnnnnnnnnnnnnnnnnnnnnnnnnnnnnnnnnnnnnnnnnnnnnnnnnnnnnnnnnnnnnnnnnnnnnnnnnnnnnnnnnnnnnnnnnnnnnnnnnnnnnnnnnnnnnnnnnnnnnnnnnnnnnnnnnnnnnnnnnnnnnnnnnnnnnnnnnnnnnnnnnnnnnnnnnnnnnnnnnnnnnnnnnnnnnnnnnnnnnnnnnnnnnnnnnnnnnnnnnnnnnnnnnnnnnnnnnnnnnnnnnnnnnnnnnnnnnnnnnnnnnnnnnnnnnnnnnnnnnnnnnnnnnnnnnnnnnnnnnnnnnnnnnnnnnnnnnnnnnnnnnnnnnnnnnnnnnnnnnnnnnnnnnnnnnnnnnnnnnnnnnnnnnnnnnnnnnnnnnnnnnnnnnnnnnnnnnnnnnnnnnnnnnnnnnnnnnnnnnnnnnnnnnnnnnnnnnnnnnnnnnnnnnnnnnnnnnnnnnnnnnnnnnnnnnnnnnnnnnnnnnnnnnnnnnnnnnnnnnnnnnnnnnnnnnnnnnnnnnnnnnnnnnnnnnnnnnnnnnnnnnnnnnnnnnnnnnnnnnnnnnnnnnnnnnnnnnnnnnnnnnnnnnnnnnnnnccctcgttttaggcagccaaagagctcagcagagatggcagaaagccaaaaggccagggctggttgagcctccagcacgtggataacgtctggtgactagggtaggattcccttcatccctggcaaagccagacgggtttgctgtaaacaaagtacagcagccacccccctccccatgactttgtttataggtagaatttttttttttaaagcccacagaagtctcgacatcgaatcatttttatcccatagtaggagtttctgggaaatacaactagcatgtagattttgagcccaacttccagtggatcaaaccagtatccttacagagaattatttagcacagtggttctcaccctgtgggtcatgacccctttaggaactcagatgtcttcattatgattcgtaacatgagcaaaattacagttatgaagtagtaatgaaaataactttatagctgggggtcagcacaacatgagggactatgttcaagggtcgcagcattagcaaggttgagagccactggtttaaaggaaaccaatagcagttcttgagtaggcagcttctaggtaaaaggcttagaatggagacagagcttttgatagtttctaaatcctaaaggtgatgtctttggtgggggagttgggtttttttttttttttaatcactctctaccttcagagactgcaccaagccctgggtcttgcttcccttcactggtgaacactatgcttgtgagattgtgcgtgttcctgtccagccggccctccatatctacagaacctgcatccatgggtttaatcaacagttgactgaaccaaatgcagattgaaaataattcacacacacacacacacacacacacaaagtcatctgcattgaacatgtttggacttgttttgtaataattccctaaatgatacagtagaatgatgttaggaatgacaagtagtacagagacgacgtaaagtacatgtggatatgtggatccacgtcatgtgcagatattgcactgcttcatctaagggacctgagcagctttggctgtggctggtccccgcagatactgagggtcggctgcctatcctgataagtgaagaatgagcatcaccaacatgctgtagcttgtttgtccttcatccctatttctgattgttataggatcgtgtgtgatatgtgtggtgtgtgtgtgtgtgtgtgtgtgtgtgtgtgtgtgtgtggtgtttgtgtgatatgtgtgtgtgtggtgtttgtatgnnnnnnnnnnnnnnnnnnnntgtggtgtgtgtggtatgtgtgtgtggggtgtgtgtatgcacgcacgcgcatctgtggacactaatgttaattatagccacaaacaatcccttctcctggagaaggatgggtatcatcaggcatgcagctcccagcttgggtggagtgtccatttcacttgtgtctcctaagtcacagctcctgagccgagcagagcctccatttcagtcccccctcggaatggctgataactagagcatatcgtccacaaaagcccaaactctgcttttccctccctcaaacagtagggcagttttttcttgttttaaaacaagtgaactctgtgacttcctcagctctgtcttctccctatcgtcacggtgaactgccgcactctgatcccacatccttgacggatagacgattccctactttatcttacatttttgcacattgattttctcacaataatcttcctgttgtcgtgcagagacaatttcaggactgtgtggctacagaagagaaaacttcatgcactcagaaagaccagcttccacgtgcttttctgagaatgtttcagtgtcacccatgataatgaaatgctctactgttgccacgaccataacatagttaataatttagcacttgaattacatcctctatgaattgcataacacctctattatgatggagggtgcatgtaattcctcaacattacgctagtctctagtctctatcccttcatagatctgagatttgagatggagacagggatgtatgaagatgctgtgagcatcctcggggccctccagcaagtgtctctcgtccttgattggaggcaggcatatgtgaactttttaatgaagcttaacagtaaatgtgtttggccttgcagggatgtgatccccattccagccatcagttctgctcttgagcctggagccagccatggaggaagtgtaactggatgcttatggctctgtcttggctggatttcctttatggatcctgaactctgaattccctatggctttcatacatcataaagtgcttgcctttttaccttctcccaccccacaaccacctaaaaacatgaagcccatttttagcttttgagaatcatgtaaaagaaaaacagattgttcttcaaggtagctgagggactgctgtcatagacagtctcctaattattctctgacctgccagtagttaatggatccttgtacaacactagggggcagctgggcaacgccttccagagtgttctctaagaccttatggtatgaagcacgttgggatgggttttaatcaccgttgactacatttattagctcatcatagaaccaggcaggagccaaggagctaagctcttccagtattttatgggccacagtcagctggaagccactgtgctctaggacagaacatctcggcccagcacagagcctggcctggagcaggcgctcaacagatactcaccactagtgtccctcttcaacctgaccgagccttttgcctcgtcggtgtggataggctgtgtcagaggattttgatccactctcctgggacagaaaggagattcagttgtaaatatcaattgcaaacaaatttctcagtgtttaggtttttgtatacggtagacaaagtctttgcctctagacaagtttatatttagccagcattctcccaaaatgcctaggctgtaattctcaagtctctctggcaaatgtctggcagggtcttggaaagggatgtgcacaaaggcgcacctggagccgagctatttggagacgtggcaagttgggatcatgggcttggtggggaaatgtattgcagatttttcatcaagtgagcttcccaaacacatttaaagtgatgtttgcctcacacggatgccttgcccatggagatggcagtgctgtgcagagaaagagctggacaaggcaggttcttgggtcccctgggccttcatgcccttggctacaatatgcacagttagagggtcttttttccttcaacttagagggttttgtttgtttgtttgcttgtttgttttagaggagatgttttgaatgtaggaagttaatggcaaagggttggttttaggagagtgctgtttatctgagtggcaccctgtgttagcacccaactttttcttcagatgtacacagggctatgagcgtgcaggccgaccttagtctgaagtacttgtcatcacctgacagctcctctcagtcaaagcacctgggagggacattcttctgtgcccccacagccaaggctttccttccccacgggccatgctctgaggcactctagcagtttcccagggttaggaaagcaaaaggccttatgctttcccttgacctgagacatacatgggcacttagtcccttaaaataagagaaaattgaagtaacctaaattgtcttgggtgccaagtggccctctatgatgagacttaaaaaaaaaaaaagaatctaaatcgaaatgctttctctcgggctggtgcctccatcgttgtgaagagcatgcacacaaagccctgggcagagaatgtatgtttgatgtgggtatggggatcagcctagtaactgtgaggatgacctatgtgtatgcatagctttaaggactcagccttctgcttgctgtgcagggagaaagactggccctgagcacttaagttgcatctcttcgggcaaagagaagagatgctccagccagttgtgcttagctcccgcctcccctcagtcctctccagctgcccttctgggtggcagtgatttgagaatgtgcaagtccacagagcaccccgtcctaagaaattcaaataagatgttccctctgcagtggaacatacagctcttatcagagccctactctgaaacttgccaaggcctgagaagggcagatgagacagatggccaagccagcagactttgccagtctcaagagtaaggtgtctaatgggagccccgcactagggcactctctcctctgccacgtatacacccggctccagtggaggttagacatctctgtcacaggtattgatttaaggccaccgctctggccaccacaccaagcagcctgtttcttccctacatgtggattttgagatgggtttggcagtgtcgctgctctggaagactcgccctctgccttcctgctgaaattggcttatccaacttaattagatcaaccattggagctgtggccccggctcattcattcctccaattgctgatgtgaagatggagagggttctgttaagcacgtcagttttcatgtggccaaacaggtgttccgtaagggaggcaatgccctctggagagttcagcaacagatgttaggtctttttgtgtgtgtgtgtgtgtgtgttcccttttcctgtttggcttcagcatgaggcaaatattgtgaaatgcatgagcctttctgtaaagctaaaagctggaagcagaaaacgtgcaaaaaggcacagggcttaaaaccctgagggtttgcacctgctagacaagagcgatgggcttaccctgcagacccttgtctaactgaaaatccaggctactcctgcagaggagagaattttcctggagaagatctatgctgttacctggttggtccttaacacccccttcctccttaaggaagtgtttaatattcagttcatcccactgaacgctgacctgggctactggaaagtcccatccagctacgatccataaagcacttgtgtgcaggctgctcactcccagccattccccagggaagtctgacgaggacaccatgtctgaatgagcagttgagtcaggtgctcctctggctcggtcctgcttttttgaacagcttccaggtcagagttggagttcttttaatgggtacagctgagacaaacaaacaaacaaaacaacaattcccaatgttatccctgagcacatgtcagctagtggccttgggaacattttcttgcttttttagttgtactaagtattcattcatttattccatttttatctagtttgctggctgcagataatccaaacctacagaaggctaggctcccttgggtagatagttaggatgattatctccaaacagatggtgattattttagatttatttattttgagagtgagtctcactgtgtacctggctggcctgaattcggtgtagactaggctagccatgctggatcaaaggtgtgtgccaccatgtcaagctagtttttttggctttgttttgaagagcttatagagtcaaatgttgtaggttaggacttttccaccaagttttaaaaagcagttaggactgactgggacagagcatcagctcagaatcagagaagcaactggctccatcttctactgaggcttgccctggaaactgctcaccagtacagtggcctgagccagagccagatctcctttccctacctgggaccaggatttgctgtttggcctgaagcctctatgagtcttagtgtgtgtatgtgcaggcatgcttgtgtgcttgtgtgtatgtgtgtgcaggcatgcttgtatgactctgtgtgtgtgtgcctgtgtgtgtttggaatgcgtaatgaatgtctgctggctgctcttgtctccatctaagtaaatgtttaatccaatgtatagactgttctctctaatgtgaccctctcctcactggattcccctattaacccactcctatgagcccatcttatttcttacagatgaatgatgctatgggatttgaattgccctgggtgtattttgtcagtctcgtcatctttgggtcatttttcgtactaaatcttgtacttggtgtattgagcgggtaagctacatctctttcatcttgaaggcagagtcctgagatcagttgccaagaccacgcaggcttagagggaccggtgggtgggtaccagttccttcgtattgctttctcttctgctgaggcttccggaaccaagctgtttcctggaacctcaccagctactatgaaagaaagccactgagagattattgaccaggaattaattaatcagtattgttgcttgggatttaaatttcccttgcttggccttttgtctgtcctaaaatgagatacatttataattgctttcttggtctaaatccaaatacaatgctcattaattggcacaaaactgctgctaaatgagtggtctggactgactttggagagtctcttcctgaagatttcagcatcagggtttgccccgcctagaggaaaactgagcaagggtacaagctcattcaagccctttccttggagcgctgccctccacccaaagctctgcgtggtcctgcagctgcatccggggctctgttctttagtaaatggataactgataactgatctccttaccttttacaggttaatgatgcgataggatgggaatggccatgggtgtattttgttagtctgatcatccttggctcatttttcgtccttaacctggttcttggtgtccttagtgggtaagcagttggatccccgttgcacattattctcctgataccacatgggaggcagccctgcgtgtctctcagctgctccctggtggcctctctgcatgcctttggactctgatgtcccctctgtgtgttgcttttagattgaattgtgattctttctggctgtatctgtctgtgagattccgtgtttctgatgcttgccacgcactgttaacttaatgaaaatgtttcccttagaggtgaattacaagcaaataaaaggcttcctagcttaggtctcctccaggaagggagtttggtctcttgtgggttttattccattagtacatgacctggccctcattagtcactctcagagcattataaatagtggtgtttcagattttgtggtgaagcctagattggtacatgaatacccagcagtttcaagccctgccttcctgaggttgggatactgtattagcctggcttgtcactgtgtgagctatgcttccgattccacgttcagcttttccacacatgttctctatggccttattattccatcatttggtcaccagtttgaaaattcatcttgtttaatgcctatttctgggtataccctccgtctatcaggttcaggagagatgggattgggaagggccttgggccttgggctgtgccctacagtgatgggagatggtattctaaagcccgtgtgttgtgagcagatgtgaatctcagaacctctggcgtgctgcagaaagtggaggatccccatcagagtaggctggggctctctcaaaagcacttccataaatgggggcttaaacctgaaaaacactgtgggtctctcatcattagtctgtgatgttgtcttataactaggataaaatatttagttaaaaattgtattctattttaaatgaggttactaaaatgtcttgtcttaagaattcaatatgtaatgtttataatcggtacaattttaaaaattatggaataataatatagtcaacttttaactcaaaactaaagcaacacaacacatacacacagtcagtaccagcatacagtcactgctctgaatagcccagaagacacccatgcgccctcactttggccctagtcaccgcactgagactagacactcaggatatcacactgatggacttggtcccaagggaacttatcagctcactcgatttatcttgctctttccgaggttgtatctcagggacacgatgtcttcatgtatcctgggtcagtaaagtgagcttcatctcattttgtggagacgctgtcttttgcagagcagaatgcagagcctagccatccaccgtgagccccctgttcgccttcctccaaacctgccttgctgtgaattgagtgcagtcagccgtattccatgggacacacagtcatgaaagacccttatctagaagtggcccaggagcagtgcctgcctccctccctccagtgagagaagcagggagtgggcctctgtggcctgaatttagggtcaggatggttagagtggcagttatagttggagaaacttggccacaggaactacccatacaaggccagcacccgcaactgtgttgtgagttccttggcgccccatgtctccttaacccaactaaactgacggaggccatggaaaccactaattttaacagtgccagtgacgtgccttatcaccagttccccctccctgggcaggaactgttgcctccggcatgatgaagcagagatataagccagccaaatcctgaggcatttaaaaaagcagaagatgggggcagaagttcattataatgacagggcctcaatgtgaaacctaggaggaggacccctaagccagagggttaaaaaagcacagattctcacctagcagtttactgaaatatatcttgagaggaaataacgagtttttgaaaggcatttatttttacatcaaaagaaaactatgaaggagaaaccaaatggtacctgaatgttaaaaaagcaaacctaggacttgctggtgattttaactgtcagctcatgctgggccctgactcctcagaggtgcacactcctctcctccctcccacccccaagccacactggtaagaaatgctaaggcaggctccgggtagagtcagagctggatctgcaaaggtcttcgaccatgattctcccagttcctgatgaaggcttggctctgggccagaggccagggatgccaaggtggctaaggcacagactctaggctcaggcccaggttacagctggagctatacagccagtgcacagcgagtagagttgggggctctcaagggagactgcctgggcctgcagggcatgctctgcctctcagggttccctgcacctctcccactgcctgggtccttgtgcctccattcacagtttttgctgttattattaaagcaaacttaaaatcattactgtaatcttaagttcttcacaatattcatttttagagaacattagagatgttctaaatctaggacacaaagtgtcagaagacatttctgtggcatagcccttaagggactttcagactaacaggtacggtctccaagcatcctatcgtagggacttcagccaaaaccttgtgcattattaccttcaaatgaggactcactcagaaacagtgactgagacttgtgtctgagactgagcccttttcttatctctctctctctctctctgtgtgtgtgtgtgtgtgtgtgtgtgtgtgtgtgtgtgtgatagcctctcgctgctcagtctaacctgacatcaggacggtagctatcttcctgtcttagcctcaagagtgctagggtgatgaacatacaccactgtgtctggatgttaaccctttttaaacattggcttacacttcttcatttaagtatggctgtggcatcctgttgtattgtaatctacacagttattttggccttcgcacatttttaaggcatttgcaggctgagtctctgaaaatgctgtctgttttgttttgtttcctcctcaaggtgagactgaagctcatgaattgcatgctctgtgagcatgggtgtagatgacagcacctctgctcacggcgctctgtgggaagagctgcgacagacagctggtagctggtgctatggtttaacatttgattgtccttgctgatccctggtgatcctatgatggacaaagagctaaaaagactgcttcctttaggtctgaggtctaggtagctgatgcatgtcttgtcttctcatttgggtgttttaaaaatgtgggagccgttcgtttttaaagctgctcttttaaatcctggcactctcaaggtttgcctctgtgtataggcacataggagagcagtgcttatgtgtgttactatagggttctccaggggacagtagtcctcacgggtgggaacctgattctctacttcaggacccacctgccatctgccgcagctctgtgatgctgaggtttgagtggtcaagggagacctcccgggctcctgaagtcccaaggacgccctgacctggcccttccagcatcccaagttcacagtggtctcagtaatgctcatctttagtctcttcttccctaaacagatataaccttgtcttgttcccagcctcacagggtggcttgaaatcagccagtgaatgtagagctacgtggagaactattctaaggcattttgtcatctagtacattctctttttttggtttttcgagacagggtttctctgtgtagccctggctgtactggaactcactttgtagaccaggctgacctctaactcagaaatcctcctgcctctgcctccggagtgctgggattaaaggcgtgcaccaccaccacccagccatctagtacattcttaccttcaacctacagaccacactctactctcagccctccctggtgaagcgggacagtccatgggggctctgtggaaatctcaagaggagaaatttctgcatattttaggaagcaacttaagcagacatttgttatgcatacatacactatgcttgatgccaccaggagatggccatgggacatattgttctttgtcagttgtggaatattttgtctgtagactaaaatcattgcttttgcgttagacatagtgagggctctcttctcttttgtgacagtggcagggcgtgacgctcaagcatggcagctcaaacaaccgcagtgtgaatctgctctgcctttaccatctgtgtgactgggccaaggccacctctttgagatgactttcctcaggggtgtgtctgcctgtggaacctcatggagtccggggagccttcagagagctacagaatgtagacccttaagggagactgtcagaaaggttctagggagaatagatcagtgatctggaacaaagcagactggcctttctaagccagtgaatagcaattggccaagataggtttagactagtgagaaatcaaagctctacaatatgttgaaatggcttattatgtaagcatgtgaataatagaagccagttgtgtctaaaatgcattgctacatgggctccctcctgggcctgcttgatggaatagggtaaagtcatttgacattggtctgggaacgcaaggcttttgctaacatcttccaaaaaaatatttaaaatagctcgtctgaagcgagctttgtctgtttccaggcaataaacgttcttcataagccccctttcaggacataaaaccaaatgtaaactgagccaatgtgtctgtggtttcaaaaccagtcggctctgaattaattttgtgtttatgtgtctgtgcgtcctggtaagcctcaaatctaccaagtcacaaacttcttttaaactcactcactgagttttctactcttacgggcctgtattagtttcgtctcggtttgctgtgacaaaatacatggtagaggcgccattaacgaggaaagtttgcctaggctcgtggttttaggggatacagtccgtggtgatggggaaggtttgtcagtgaccatgaggcactctcattgcaactgtgtcaggaagcagaaagattcgaacgctgcactcagcttgcctttcccttttgtacccagtctgtgacccgagctcacacacagggtggcgtgaccttcattcaggatggatcttttctcctcagttaaacttttctgggaaaactgtcacagagttatgcctttggagcaatccaagtccagtcaagttgacaatggagattgaccatcaaccgggcccctttatcttaacttgaagagtttgggggcaaacagggtaaagcaaagcattgtattaaaaaaaaaaaaaaagcagaggcaattttcaaaacaatttgtctttctgaaacttacttcctagactccattctgaagacataaaacaccagacccagacagagatgaagcatggctgcttttgtgaagcctcagcttccgaaataaagatggatggttacagagaaagtggggcgggaaggtggtaacgtccctggagagacttaagaccacactttgtcagaattttgcagaatagagtcaggcttacagcatggggagtcggtccttggtccagttatagtcatggcattatgagctaggaaatctctgctgccttcttggatactggtttatggggcaaaacaccacattttcgggtattttctaagtgaagacatatgccatgggaatagtcattctacatgtttcatgatagtttaaatcttactaccaaaacctattgataaatagtgaacagcaggatttctacattcctgtatctacacctctgacatatctgcatcatagaaaagcagtcagtttgcagagttaagagggatagcacccaggtcctgagctgccatcagcccatcttggaaaacagaaatataatgtgctgaggtaatgagaacccatggcttgaacaacaaaacccttttggcaaatggaagtctagccttttccaggaatggtagcttacacctttaatatcagcactcaggaggcagaggtaggcagatctccgtaagggttcaagaccaacttggtctacgtagtgtgttaacatggcaaacagggctacatagagagagcttgcctgagagaagaggatggtggagagctccttacagaaccctcttacacttaggtgttttcttctgtatggaattactctctgagctcccagaatctcagagacacctctgagggtcactttaagcaaaagactccaaaatattgcataatttcactcgagttgaatgaggctgtctggaaagcctgtcctcataactgggtgtccttcttggactttggggtcatgttatgagtggaattgatgctgaggttggggtactgaaaagagccacagtcctctagggatgctctttggtttagctttggtaaagtatgaaattaagccccaatctgactttaaagagaaaaatacccaatttctcttttctaataaagaaccaagctaaacatgcatatatatctactctggacattaagctttcttgttgcgtagctgacagagaaaccccaagagctgcacgtaccaaagtcccagaagtgcgcaggctggtagccacacctgacatcaacaagtaagcgtgacctctctgctgctggctggcagctgctgtttccatagaaatggctgttggatcagtggaaacgaggtaagagaaagttttcgctgatgcttgttccttcaagctgacgcttgtttccttggcaacagcagtggacagcagccaggctctagaaacagattcagtagagcactcacttgtcagctgtggctatcatctgctcctgaccacactgtctttgatagcactgagcagaggcctctgaggacctggcaggctccgctggcctcatgtgccctcctgggcatccatcttgcccgtggcaaactgtgtccaaagcagaccgtcagcaatctcctccccacctgtgctcatcttgttacgcagctcagaaggcagaaggttgtcgagggcaatgatactgcagaggcgaccgtggagtgtgttggtctcaagtcctaggggagtagaattcattacagtgattttatgcacagactcagctcttctcaaagctggtgataccttaatagttgaaattaaagccataattttcatgcgttcctcatcctgctggtggccatcactgttgcctacaatgaaaagaatgtttatgagtttaataactcgacttcttgtaagaaacatattaatgacagtctctaagatgttactgccatcttctgccagatcctttccttctgctcagtgttcttatataggctagtaagattgcttccatgcctcaggtatcggctctgtagggcagcttggtatctatacaaagatagcatgtctaccatatgtgcaacttcttgttacagttcagtacctgcttcttcttggggttttgattttatttcggcaccttgcccgtgtgagacagcgtgcgtagggcccagcacacaaggcagaacgttgagagggtctgggtaagttatttgccctaaacgcctcaaagacacattttcgttaagaggattctttttctgaagaagaagggggttgggaggagggaagccatgcaaatcatagctgtctctttgagaaacagctgagatatgaacctgcggtgctggcagaatgtgggtttgggcatccagatgaactatgggaagctatgtactgtctcccttttctttagttttctggaacacggtgactttgtctggaggcagtgctgagcgactgactgacccgtaaaaagtctgtgccatctagttaggttcaaacaacagacaagacaaagtagtgtcttattcgactcctcttaattctctccccttctctcctatttaaaaaagaatggcttttcctttatctgatgagtaatgtttgagtgcccacacagaggagctgtatttacccagtgccacactagccaccgtggttactgtaacgagttcagagcagagacctgggcatggtaacatgggcctgcaattctagcacagggacataggcatgggagtcatgagttcaagaccaccctgagctatgtagaaaggtgatttttttttgtcattatgaaacatgcttaatcaagaaggtaaacttatggtgaaaaacctttacaaatgctctgagaataggagaggccatgtggtggcacagctatggtggaggtgtgtggcagtgtcccggggcactgaaggctgaagaaacatctgccatagacaggcatagtgcagagacagaaggcactgagcttctatcagggccggaccatgggaagaagcagaagacattggagaaactaaacaaagctgggaaggcagagactgaggacctgagggctctgggaggcagggacaaagggggagaactggctaacagagctgagatctcctgggtccttgtagagcctgtggtaagctttgatcatggctgaagagtagagaaatcacacacacacacacaaaaaaaaaaaggtcaagaattggtgtgatttaaaatttaattttataaaaattataatattcacatgtcttcagattacctttaaaaatgttccaggagtgagattgtattgttagtcatctagagagatgcatagagagatgataatggagatttagcagatgttatttgtggaatccagctggtaggcatattggtggcattcattctataatccattatgcttttatgagtatttgaattttctcttagtttaatgctggaaaatctgtatataaaagtcaccgtagctgcagtgatttgagtggacttagtataaagggagtatatagaaagccaacctaaggctgctgtgagtaccaatggtaccagcttggatatttcactataaagaagtatgaaatagcacgaaaaaaaacaatgtgactgttttcagaatatggacgtgggcttcgcagtgttgggactcatagctccagaagttcctgttttattgcctggaaatgctcttagaattgttgtggagggcagcaaaaactcagcagagaatgtcagtccatttgtgggggactcaaagagtggttcagggatgataagacatctgtagggcagaatggaggggagacatcgtcagagaaagggctccagaaatctaaataaagaaatctaaatctgacatcttgggccatgtgcatagctaattacatgctgtatcatactcaccaaagcctggcagaaaacagctactggagagcccagtgctgggctcagactgtagtgggtaagccttaaagactgtgtgtgggatttgaagtgagactttaggaaaggtaggcattagcaggaagccacattcactataaaaacaaactcccaaaggatcagaccaaatgcctaatacattagacttccaaaacaaaaaaacaatactcattaatgccaaagtgcagccattggcccaaatatttcatctcatgatcaaaacactgagaaaaggagcaatgaaacagcctcagtgggtggggacgcacgtcaagaggtgacaggagcgttgtactaggtgatcgggcttgaactgctttaacgctgttcaagaaattaaaggaaaggatttgcacagcacaaagagaagatagaaagctagtgtgtattaccatgggagtaaggccgtgtccaaaaactggttggaaagcaaaggggagaagttgagtgaaggtttacagatatacaggttagtaaaaggcaagctaatgaatgtaaagttggagtcacagagaaaaatagatgaggaaggaaaaaaaataaataaatgcaaataaataaaacaagtttaataaatggaagaaaaaaccacaatcctaggtgcatcaaaggcagatagccaaaagttaaggataatatgttaaaggaaattaaatggggagaattgaccccaatgatgtcctttggcctccacactcatgtatacacacaaccaacatacacacacacatacttaggtgggtgaagtacaatacattctacaatacgatagaattcattggcttggattttggacatagtaaaaagaagccacagtccaatggactctgatttttttgaagaactgaaagaatttgggggcatagctcagcactagagtgtttgcctgatataagaaaggcccaaggttcaaaccccagttctgaaaaagatgaggaaaaatggttaaggagctgaaggaaactctctggagcacaaatatctcctcaaaaaggtgaaatgacataggacagcagtgcatgcctttaatcccagcactctggaagcagaggcaggtgaatctctgtgggttcaaggccagcctggtctacacagtgaattccaggacagcctgggctacacagagaaaccctgtctcaaaacaaaacaaaataaaacaaaaacaaaattttaaaaatctgggtttttttttttttaaagttaagtgacacaaagaagatttcaaataaaagccaagaaaattgatcaacaaatctacactataagaaatggtaaacgaaactcttcatgctaaaagaaaaataattttaggtagaaacaaatacatattttagaaataagcaccaaaaaaaccccacaaatgtaaagatcgaggtgctccccccacacttctaaatttcttgaaatgatgtcatttaatttaaaaagtagtgtcaagcttccacagagagtgtcatgggcttatagggacccacagcagggacagggaaggttgggatggactaaggggagccttcctgttgtaaagtccttaaaataggtttgccatgctaatgtaaggatgcatgacaaccttaatattttaaaaatgaaacacaataatgccacaaaccataaagagattaaacaggatcagtgccccagaataagtcaggagagcaggaagggcagatgaagcacgtgcagtatagaaaaataaatatataaagcgcacagcacttggtgtggtggctcatgcttgatgttctgacattggaaggctgaggcaagcagattataagttcaaggccagcctgagctatatagtaagaattcaacgcaagaaaaacaatagaacaggtaaaatagcaagatggcagacagctgtaagcttcatcaaggactgaattcactgaaagtgactgtgccagtttaattaggcagaaattgttatactggataaaaatgcaaggtgacataaaatttgacacagactccaaacgaaggaacatggttaatattaaatgtcacccccccccccaaaatggacttcaagaagcagttttagaaatagggtagagagaggtggggcagagaggcacatgcagagaggagaggcaaatggaagcagagagagagagagagagagagagagagagagagagagagagagagagagatcctgcagtaaccagggctatttcatcaagatgcagcgactctgcatgcttgttgctagtaacagatacaatgtgcttaaagccagacctgtccaaattaagtaaaacactggtgagcccacacacgtagatggaaatgtttgtgatgtcttgtcagtaattgacagagtaaggagattaagaaaaaacagcaagtatccagagtatagctaggttaatagctatcaaataactgcctgattgactttatcagaacaccgtgtactgttcttttcaagagcaaacagaacagccacatcatgactattaaaaaaaaaatcattgagtctcaaagcagagctggagggatggctctgtggttaagagtattgggtgctcttccggaggacctgggttcaattcccagcatgatagctcataactgtctgcaccccagttccaggggatctaacaccctcttccgatctccatggcaccagtaatgcatatggtgctcagacatgcatgtaggcaaaacactcatacatgtaaagtaagatttaaaacaactctgaaggtggactctctgtggtggtttgaataggtttggcccctatagactcatgggtttgaatgcttggcccacagggaatgccactattaggaattaaagtcctgttggaataagtgtggccttgttggaggaagtctgtcactgtggggtgggcttcttattgctcaagctctgcctagtatggaggcagcctacagaagacagtctcctcctggctgccttgggatcaagatgtagaactcttggttcctccagcactattttggtctgtatgcttccatgtttcctatcatgatgacaatggactaaacctctgaaactgtaacccagccccaattaaatgttgtcctttataagtgttgtcttggtcatggggtctcttcacagcaacaaaaccccaactaagacactctttaaaagcatgcttttttctagagtctgaagatgacatagcaggcacttgtcaccaagactgacaacctgagttggatccccaggactcctatagtgaaaagagagaactgacatcgatcgacaagttgtcctctgacctccacatgcccacagtgggatacactctaacataaacagcaaacagatggaatttttagaaattaaaaacaaacaataatgaaaaggtatgcttttctagcttttacgactttaagagagaaatcaatgataacctatttataaaatctcttaaatattttgtaattaataaatctctatgatgactcaaaccaccacaagcatttaaaagtactttgaatgatactgagtccagtgtctctgcatttatacagtccatctaaggcagtgttttgggggaagcttgctgttgcatccataaggaagtgtttatgtgactcccagtaagttcagaaagctccacagaccatttttttctggatgcattgttaattcttaacaaatgagagctgctcaaggactttcacaatctggcaaccgtgctctactgcagtgggttctcaacctgtgggttgctacccattgagggtctcatagcaaatatcctgcatgtcagatatttacattacaattcataacagcagaaaatttacattatgaagtagcaatgaaataattttctctttgggggggggtcagcacaacatgagaaactgtattaaagcagcattaaggaggttgagaaccattgctctacagcaacctatagctgacatcatggttaatgtttgaagactaatgactcttcctaagactagtagcaagctgtagatacatctatcagttcatttattcaacattgaattgataatactaagcagtgcattaaggcaaaaaagagataaaatacagaaaggctgagaagaaagaaaaaaatgtatttgtattgatagtcagcatgcttgcttatatggactaaataaagaggctaaaaccttattggaattaaaaccagcatagagcaaggacaggacaccatgtcagacatgtgagttaattttattcctatctaaaaaaaaaaaaaaaaaaaaaaaaactataggaactgtccaaagggttgagcagcaggcatcaaggcatgtttgtggtcccctaaaaatagactgaaggttcaggagaggttgccacactggggcagcatcccagagggctccgaaagggccatagagttgaagagaagacagagttggtgccaaagcaagctcagagggaacagagatgatggggcatatggggagcaggaagcaagggcagagaaagtgaggaggccatgtgataggtgtgggtctaagaagctcctgtctcagcacatacaacccggaatgctggctctctgcactgaattctccacacccctcatctggtttatgatttctacgctggtctggggtgcaggggtgtgtttgtcagcttctcctattgtatggggtgggcaggacatcagaagtcaaaagtcctgactccactccatcccacactttccagagatgtgacttgggccatcacagttcactactctgtacctaggttctttcgtccttgaaatgagacaacctcatatcctgcatgttctgagaacaaaagagattaacggaagggacttgaaagcctcaacgccctgtccacatgtgagggtgtcatgtgtgtctgactgtgctcttccaggagaggaaaaccattatccagggtctgagctgttgcgcaacacggtcagattcttctcaacaactttattgcaggaacacctcaatgctacgggaaccctgggaacccagggaggactccttatatacaccccagcacagggaaaagctttgtgtcctcctgggattggtcagtctgccagcaccttaatttgcatgcacctgatagggaggggttggcgccagatttgttgtttacagccacggtgtaccagaaaccggcaccatcttttaggcataggctgcctacactgaaccttcacttgctagtgtttctctgcagggttccatgactcaaggataaaatattaattcactcagaactccatcattccttttgttgtacaaactttttaatcttaatccaggctttctaccctgcctttgaccatttacttcgtggataaaagacacacacagccttcatatttacaacaagccttgatcagcacaggatctgggtagatatctaccctctatgctattataatctgcttttctatagataactctcagttattcctactatgtctcatctgggctgctcctaactcatggcatctcccttctcctcaccttcttctcttactcatggttctcactcaaccccccccccccaggcctgggatccctaaaatccacctatgtctcttctatccagctattggctgtcagcatctttatttatcaatcagaaataacttgggggcaaggtcacatagcatcacttacgtctatgtgcagactcatctctggggcaaccaggtcttgagggcctgcacttagcattgcagtatacaataagagaccaaaccttagcacctttaaagttctgcttcaaaatcaatcttggtttaagttgtctactggcatcttctgagtctgcaagcatttggggctttcaagtccttgagccttggggacttttgcatcatctataggactttaaagtagtgggaggcaaaccccacctgtctgtcacctttttcccagaagggctcccgtcaggaatttttaactgcttattcataatttttacttatgaacagactagcagacataccagagaattagggctgcaccttatctcttattggcaatgattcaacatcagatttgtgcctaagagggtgatgggaaactaggctctgactgagtgttgatatatggacagagttcataaggatggtaaagaaaggaaagtgttgtctagctcctcgggcctgtcagagagctagagtgtgaggatgagacttcgggggagctccaagcttgctgcacagtagtggtgcaggagagtgaatgtgcagtgggggccctgctgaagacgcacaatctctcctctgagctgtggatactgtacaagtatttaatggttctgaactccatctgaactataaaactgagacagggtgaggagaaccctggagcaggcaatggttttaggagtggctatggagatgaaggtacagacttgggacatcctgcggccagtgcctctctgatgagaaatgagatctgtgtggttcagtcctcaagctggggtggagctatgtgaggccaggcatagacctgttgctcatatccttgttatatggcaaccgggattagacccagccaccaggctgtattcttcattccatttgttgttccattggatcctctgtgatcctttggtacaataagaggtctttgcctctgttttatagatgattaaggctcaaaagattcatatagataaatcaagacccagagagatccctcagtttccttaaagtgacacagcttgaagaggcaacactcataattaaatagaaactgtgattccagagcccaagctgctctctcactggccagaagctctctctgtgcctaaccagaggtattcctgtggctcagccggtacctcctaagaagcttggttcttcatgctctgtcaggctgagtctcttcccaagtctaattacccaaagcagagtgaatagcagattgtcttctaagaacttgggcccgccaccatgtgcttcgtaagtctactgtgaacaagtccctgtggctcttattcttttaaggactgctaactggggagcacatctcagctccttctcctctgtaatacaatacccttgcctatattttcttaccattatgcttttcattgggggactcctcctgagaggggtgcctggctcctttgatgtagcttaccagatggtttgccatttacacaaacatggtaggatttgagttggagttcctagctatttccctaggaatgtgtagatgggttagctagctatttccttaggaaaatgcggatggctgtaggaacgtgcggatggatgggttaagccccccttgggtctttgctgctcatctatattcggatgccttctaccccctgcctccccacccccgtgttgcttatctggctattagtctgtggcaggcagtccaactgggcctttcatacaatatcctgttttggtttataaaaaagatgtgccctgagaccacgagtacctttagatgtgtttatatgttacagaactgccacctgcccatgtcactcttcaggcacacacaacaaacaaaaactacccgacaagtctattgaggtatatatttttaatttaattaatttatttattcactttacatcctgatcacactcccccctctgcacagtcccaacctcacaggtttctccccctactccctcccttctcacagaaggggaagtaccacttgggtaccaccctaccctgggacatcagttgcagcaggactaagcacatcctttcccactgaggcccaaccaggcaatccagttaggaaaaggggatcttatagcaggtaacaannnnnnnnnnnnnnnnnnnncatatgaagactaagctgtacatttgctacaaatgtggctctttggttggtggctcaggctcttgaaagcccatgggcccaggttagttgacactgtagatagtctctctggctccctcaattctatccccctccccttccacaagactcttcaaacagcacttgatgtttggctgtgggtctctgcatccgtttccattcactgctgaatgaagcctgtcagcagacagttatgctaggctcctgtctgcaagcatagcagagtatcgttaatggtgacagagattagctttcttacatggggtgggtctcaggttgggcaagtcattggttgacctctccctcagtctctgctccatctttaggcaggacatcttgtaggcaggacaaattttgagttgaaggttttgttggtggatcaatgtctccctcccgccattggaaatctcacctggctataggaggtggccactttagtctccatatccccactgataggagtctcagctacagtcaccctgctagactccctagaacctcccccatcccaggtcttcagcttctcccagagatgcccccataaattgctgttctcgctcccagcctctcccacccagctccctccctccctccccccacctccaatgactattttgtttcctcctctgagtgagattcacgcgtcctcccttgagaactcctcattccttggtttcttcgggtctgtggattgtagcatggttatactgtacttataagtgagcacataccgtgtgtgtctgtctgggtttggcttacattgtaagtagaagtatttaaaggattcataaaatacgtggtgatactagtttgactcatctggtcatgtgatggctttcattcaaagaaagctacgtccaacggggagcttgtgttgttgaagagtgtttaaaaacacctcttaaacttgcctttgaaagtctttagcttttaccttcacacagagactctacagagactcttaggagctctctagaaaaaaataccaaacaatttccccagctttggggtgactttggtagctatggagaccaaccctttgaagagagagaagtccttccatcgtcaaagaaggaaatgcagtaaatgcgtttcatgatttgttctaagatgtctgcgatactttgctgctgtgcctatatattttaaacttaactagaaatcttacttcaaatttttaatgatgttgtggggtgtagtttcaagtggtggaaagttccatggacacttgtgaccagatcatccaacacagagtcccagtatccatgtctgtgatagcaatgtcatcaagttgatatccttactttcagaaacacctgcttattgatctgattcttattggctggtccggccctgtgataggatctagcccctcctttatagagtttacaggctggtgtgtgaaaaagtgttaaatcaccaacttcatcgctgtgaaatgagttctacaaatgcaggactctaacccaggggtaccagatgtcagagaaatggcctcacatctgccctagcctaagacatggtcttaagaacactgctgccatggaagaccactgaggcttgagggaagcgagtgattttagggtgaccgaagatcatttcaaggaagcaggggttagaaatgaggcaggacagccgggacattagcacacacactgttataacccggggaactgcccagggcggcacgtcatgagaagttcctgagcgcttcccgttgaacgtatatatgctgactgcagggttttctgtatagcagttaatgtaacctagtcaccaagagcagtagacgcctgcttccaaaatggtttgtcctccccgatgacgacggaaatggtttcccatttaaatcatcttcacagactgttatgtccgtgaaagcatgaaagccttgaagagaagaggccatttcgagataagctcacaccacacaccacaggaaaaccccagaaaacacagtgccacgaagcaccgaagccctagattcatcatggactttgtttcagtcaaggttccttgaagggcagctatgtttccttgttagcccccgccctcccccaacacacacacacacacacacacaggtaccccatatacccgaccctgtgttttcactggttcctttggcggggcagaattcctgacccacttgctgatattccatgcctcacagtggccaatgaaatgccctgttacagtagcccctccacccgataccgtctacactggagcagctccccagggagagggaggggtcctgagctcctaccctgccctgaactgttcaccagatgcagagagaccatgctgttgaggttataggcttctcatggtgacaggcttctcgaggtggaggggctcatggaggaagcatactgcttctgatgaactttgacctgaacaactgtgattgataagattcctttgccttctgggaaacatcacatttccccgttaactctttacataagtgttttcttgaacaaagcctgaacttttatgctctccaaaatgttagttgcaagtgcaagaatattctttgaatgccttaactcacccctccttctgtccttcctttccttcctccccccctcccgcaccccctctctccattacttccttgcttcctctcattctgtttgaggcaggttctctcgtggcccaggctgaccttggatttggtatgttgccaaggctgatcttgaagccctaatcctcctgcctctacctcctacatgttagtgttgggctgtaggtgtacacggccttttcattctctgactttccctttttgtctgtatatgggtgtgatttaggtctaaggaaggttgttctctaccggcagaaaaaacaactttctacttcccccttgcctttgctttcataaatgttgcttttggttttggacgagtttctgagtcctttattctactagaaatcagcatcttagagggtctgttggcttttcttctcttaggactagtgaatgaatgcatgtgtggatataaggtggttccatttgcttgtctttaatttatgcaagtctggttaaaaacaagcaagaacaagccctgtctctaaattaagacaattcccagtggcccatttattttagagggcatttgagaaaggaaacttcccagagcagactgcatgtcagccttctacatttggggcagtcacatttgctctgctcctgtgtttgagtgcagtggtccgctgcaggctactgttctctccctgggattttgagctaatcaaggggttctataattcaccattaggctctggaaagtctagatagatcagagtttgggggactctgagactatggggtgtgtactcaggacctgagactccttccaggttcctgggtctgaaatggtgcctcctaggagacatgagagacagccatagggaaatatgcaggaaggggccgtcattttactccagagttgggactctggaggaaaaccaaatagtgtgaaacacagaaaagcattttctactatgctggtgctttcctggttcattgggtgtcctttgtgttcccacccctgtgttagcaagaagcggggtcagtaggacttggttcaaagccttgctgctagcccagctatgaactgggcatgtgacaggaccttgttggtccttagtattggcctttgtgagatgaacaagaacacctgtgccctgcctgtgtcactgtgagatgtgagtagcagtggctataaagacactggagattctaaatacaaatgccagcaagcctgagcttttactgttgtgtgttgtggggggaaggggaggggcacagcatagactcggcccctcctgcagaagcccagccgctttccctgatgcatgttctgattctgctgaagctgctcttgcatcctgttgcacttgtccttggggccttgaggatggaggagtggcataccaccatttctgctaaactcgtgcgccccttcatcttgtctagtgttgatgcttccagacatcctgtctaccaggtctaggagggagccagactgctgcattgggagaggagccaaatgacagaggagacctgttcatagcaggtggtcctcctgctttcccttctaggtcatggatgaggccgaggagatgagaactaccattcacatttgttagggtgctccctagggtgctcgctagggtgcacgcagagtgtctgtgggcctggagaagacagatgttattgcagactgtactggctggtgttgtgtcaacttgacacaggctggagttatcatagagaaaggagcttcagttgaggaaatgcctccatgagatccagctgtggggcattttctcaattagtgatcaagggggaaaggccccttttgggtggtgccatccctggactggtagtcttggttctataagaaagcaggctgagcaagccaggtgaaggcaagccagtaaagaacatccctccatggcctctgcatcagctcctgcttcctgacctgcttgagttccagtcctgacttccttggtgatgaacagcagtatggaagtgtaagctgaataaaccctttcctccccaacctgcttcttggtcatgatgtttgtgcaggaatagaaaccctgactaagacacagaccgtgttaagtatccattcatttcaacctgtctgtgccccttcggagaagttgctgcttcccaaggtagcccatttcctttgtggggaacctgggctctcaggagttgtactggaatctgctgttttctttttgtttgtttggtttggtttttggtttttcgaaccccattggtctctggggacccagcctatctgtctcctttcccactgtggcctttcggagaatgagtaccagctccccacatccactcaccctgtcactccttcctaaaagcaagggacatttgagtggcaggtggcaggtgaagcatcccctgggctaggaagaaaggtctacagtgggtgaatgatcacactggtgtgtctgacctcacggattagcataaacaaggcagaggtagtagcgacctcagggtaagggtggttgtgtcagcaaggacaagtcccttgggccccttttcaaattatagtgtaagaaaatggaggccttagaaactggtatttttaccacattcctataacgctaaagctagccggtcatctgcgtttacagaatgctctggctgctccaccatcattttctccctgcctggttcggtgcttcacacatgacacccaaaaagccaagttagtagtgactttccaatttctgccattcctgttgcctatgaggatacaatgcagagccaggggttgggattctgtcagcccagcaggcacaagttaaagggcagtctgagcctgagcgtcgtagcaagactatcaatgttctgccctacagaaaggaagtgacttatgactctttgtttagaatttggtggtcttgaggattacacctaggacctgggcatcctaggcaggtggtctaccattgactatatataggtggtcacctatatgcctgcccctctgagctattttgattctcgtccctctaagcacctgctccctgcccttgctccctatgtgtccacaatgagctactgaggagaggcattcagcagcgagatgggcttgtgtgcctggcctcacagagtctcagtaccctccctcacagtgagcatgccttagtgagaatgccaaagcctgttgaaggcatctctctaagggaggggacaggaacatacctgggtcttggttgtcaatgacaaagtgcctccatgactcagagacttactgagcctgtgtagaagtgggaactagggattgctcagcacaaatacagcagctgttatagcagatgaggtgcacatagacgggacagtctaagactcacagtagttctgttggaccgtgagggggatttcttgttgagtgatagctccctaaagaggaaataaaatggatggctttctaaccagccagccatgaaaaaatccaccgcatgaggcctgtgttcacacagggaatggcaggctgccggtggaggctgatccagatggcacgtctgggctgggacacatgatcccagtagttgaaggctttctttcccgtagggatgtattctggtgcatgtgtttatacttagccttcttgcattcctgtttgaagtggacattccgggagagaaagacttaaaatacccgaagaaaattgacaacagtcagtcaactctcattaggagcgtacgttctaactagcgggctggactgggctggcagcagcatacatttgcaattgactagaacagttacagggtctttcatggtttgctttttatggtcaggatctcatactatagcccaggctggcccgaggctcactatgctcttcagattggctttgcacgtgggcagtcctctgtctcagtgcttcctcattcaaagggtgggatgacatttggcctttttatgcccttgagtgaggaatattctgagaaatggagatgtgggcgcccagtgttcttatactaactagggagactgttgttaggcccttgcagcagatgggactggaacttaaatttctacttgtattaatttgttgtcgcatatattccatcctgaccacagtttccacacctcctcctccatgccccccacttcctccctccctatccactcctcctccagttcccttgagaaaagaacaggcctcctggggatagcaaccatacatggcacattaagttgcagtaagactagacatctcccctcgtattaaggctgaacccagtaggaggacaatggcccccaaagcaggcaaaagcatcagaaatagtcccctcccttttaggagtcccacaaaacacccacctacacaactataacacatttgcagagggcctaggttagactcactactggtcggttcagtctctgtgagccctatgagaccaggttagttggttctgtcgaccatattcttgtggtgtccttgacccctcatgctcctacaatccttcctccctcaggattcccaaaactctgctgactgtttggctgtgtgtctctgcatctgtttttatcagttgctgggcgaagcctctctgatgataaatgagttagaatagaattagggagaagttcattgactttttttcccccgtcttattttgttcttttgtgtgtgaatctctgggctatccagcctctggttcctggtcctccaggcagtgtcaggcatggacatggatctcaagctagaccagtcattggttggccactcccacaatttctgtgccacctttaccacagaacatcttggtggcagaacaaattatatatagggtgaaggttttgtggctgggttggggacacatacatttgtgtacacacacacacacacacacacacacacacacacacacacagagagagagagagacagacagacagacagacagagaagcgtgtgcttagacatcagcatcttttaaacagctagacactggcctttagagcaaactatttaggcatcctaaatttacagctgtaccagttccaattacagggtacactgctgtaatctcagcactcacaagttcacttttctcaaccccctcagccctctgagcctctgaaaattccatgaattggaataatctggtccctcagaaggttcctcctagtcctctccagccccacctttgctgttctccactgtgagagctccagcatcaacactgctcatgccaaatcctgccctgcttctaaagtagtttcagaatcattcatactcaacacacacacacacacatgaccacacacacacacacacacacacacaacccccccccacacacatacacacacacacatgcacacacacacatacatacacacacacatacacatacacacacatacacatacacacacacatacacacacacacatacacacacacacacatacacacacacatacacacacacacatacacacacacacatacacacacacatacacacacatacacacacacatacacacacacacatacaccacacacatacacacacattacacacacatacacacatacacacacatacacacacacacacacacacacacacacacgaccattcatgcatgcacacccacccaaatccagaaaacaatcctctgtaaccaaaagcatttctgtattccttccctttgccccagacctgccaggactgatggtctgtgagctgcttatatttacgtccttcagaacggttctgggatttatctgcagcacaagcagatgaacttgttttgatcaacttccaatgtgcggacatttttgttccactctatagttgatttgtttttaaaaaaatctctaatgtaaagaacattttgttccaaaagtcaaaactgtacaaagtgattcacttgggaaaaacactctgtcctttattacttcttcccccttcattcctgtccattgtttccctctgtttttaagtgcatgcacaagagagggcaggaaagaggattgtatgcctctgtgcataggcaggtaccgtgtgtgcacgcagagccagagccagttgacccctctaaaaatccccatctttttcttttcttttctttttttttggacagggtctcttgttggacctggagcttgccattttggctagtctggctacttactaagtcctagaatccattcgtccccgttcccctagcactgtggttataggcttgtaaccacacatgcctggctttcctccttgaatgcatgccatccaaacttgggacctcattcaagcactgaacccaccaggctctgtcctcagacttccaaccttgtgctctgctctttcagatgcaccagatagaagcatgtctgtttttctatttctcttccttcataggcaaaggacaacaacgtattaaatgcacatttttttatacaaacactgttatattttctcttgttcacgcagcacaaaattctggacccagacaagtgggctcctggaatgtaactgttttcagactttccggtcactttcaaaaatcttatcatttctaccagtaactttattcaaataaacgttttcaatagggactatcatttaacttcttggtaatgagcactttagaaaatgatagaattctacttaaaatggagtaaccctttttgtcatcgcctgaagttgatcccaggtacagtagactggaggtgagactggggacaggacgtggtggtggttgtggtgggaaaccttgctttcctatgaaaggtatttccatacaggcattagcagaattattctgagaagtcgtcatcacagaagggttttacacatgcttgcttatctatactccactacaatgggcaaaagacctgagaggcaggcctatagttctagtgtaaactggtagatgtgatgttacagtaaaattttactttctgacattcttagctgcacagggtaacatttagctaacttatgtcatcattttttaaggtacttgaatcatgtatgaatccagaagaatgttgttagtaagtgataatctacatttggcgtggtaagaccagaaacaaaacatgacaaaggtctgtcccagggtcctttttgataaataatggaattgaagacctatttaatcttcatgtttaagaaaccattggctcctgcggcttcccatgcgtatacttcatgccggtcttctgagttttacttaaggatgtggctctggattgagtttaactcttggagttgagactgactttgggattatcccaggctaagctgtcatttgcttatgctttgggaagctctgctggtctagaaacctcatctgtcctctgcatctggttatgttagtagcagggtgcccttcaagtctcttttgcattatccttgagagtgctttgggccagaggtcagaggatatgtcctgctcaccctacaaccctacctaacttcatcttgtgtgataagcctggaacctcccacaactttgcttctcggtcctcttcagagggcaaaatggagataggatggccctaccagggcaaaggatagtcctagagtctgaatagtaaagagaatcaggggcagtgaacgggagcctttcttgagagtagagagaagtccctgggcaaagattccagttttgctgggtgcttaggaacccattcagcccccaaaaggcctggagctgagggaggggcaggaggagagcaagtaggggttggcttgatgaaagtagctcatctcctcccaccagagttagtgaaagggagccatgctggctttgcattggctagtaggtgggtgggacactgcagtctctgtgatggggtgctggggtctgtgtgcagaagcctctctgcctgtaagggtacccgcttcctagcagctctcgttgtgcgccccaggcccataattcacatagcttggctcctgttagcagttaacatttggacatgcagatggtccttgtatgtaaaacctgggcagtcatgcacctgactctcaggcatgcctgagcaggtgtggggttttgtgtatgtgtatagagacagggttatggggttgcagtcaagggaagcagagaagacaacaaatagtcggggacacttgtgtatctgccaaaaccttcgcagcgcaggtcttcctataattgggcagagggttgctctacctctctgccttctgcagggcaggctgggagagatcacagccagaggcaaagatcaagacaaacatgagtactttcccaggactggaggtcctgccgcagtagggagacctgggctataaaataggttcattggatccctgcccactgctctgggtgttctctctgacctcagcttggatcacttggtacccttccttgtgaagtgggtggccaggtatcacagtgagtggagagagtaaaaactcccacaatgacagcccaggatgctttaggtgtgggcttctctagatcggtcccgaggggagtgtactttctagcaaatcatgcatgtgtgtcagtgtggtcttcacaactctgatgcccacactgctgctttagggggacactgtcttctgttctgtgcacgtgtgtggctccgcagctgtgctcctgtcactgtactcaaaactgtgtgtgctaccgtaagactactgcacagccgggcaccggcacccatggatgtcctaacgggtcctttgtcctctctgcctctctcagagaattctccaaggaaagagagaaggctaaagctcgtggagatttccagaagcttcgggaaaaacagcagctggaagaggacctcaagggctacctggactggatcacccaggcagaagacatcgatcccgagaacgaggaggagggtggcgaggaaggcaaacgaaacagtaggtgctgcccttccttcccttgagcagacagacttgctgtgtgattgaggtgctgcagtgtgtcccccatgccctgagcctctaccccggggctgtgagtaaaagacaccttcccagttcccccgtcctgtctgcctgttgacatcgcagagagaatagtgcatctgtgcacactctgagtctccacctgaggcgtgggctctagggggcgtaggtaagatggctttttagctgagagggttgccatttgcattgtgggccttgggagctcagacccatttttctgtgggccaagggtagaagaagatacatctcagcttagggctatagggagggcatggtttctctcctctcggtgagttactacttcacctgcacaaggatctgagaagcaggtctcttccacctctgtgctctgtggagtggctccctctggtatcctccacacagagctgagtgcttaggccatcaggctagcaaggacccagctgattgtagtaggcagcagttaagaggcctgagagtgagtcagtgcttgctggtttgtagcccacctgcctgggcttcacactgtgacatcaggcacccttaagtgctttccgcaggaggcaaggcccaataatcagtcaaccactggaattaattgtttgtgccgatcacagagtctcacttacaacacacttttcccacagctgtgctcttagtcatcctgggagcacttgggtcttgggtaagggtaggaattgaaacctaacggcacatttgactacgatgcttccatttagtttccattctggaatagttgatagcaaagatggagaacacgtttcaagaacaatgtccctcgaaaggcctgggaaaccaaggctcgcctaccgtgtagaagatattgagtaagctcttgctgaacagagcccttgagagtcagggttgcttcctccttagctacattcacaaatgactacagccagcgcttgagatcccacaaaggacagtggataccccaggagctgtggtgaagagctaggatgggtggggccatatggcgtggtctggaaggttggtgtctgtggaagagcagttgagtttgaggagaaagcttccatactgagactaccatgagtgagcaaaggccatgttccgggactctgttgggttgagcacagtgggttcgaaggcagagtgagccacagtgggcaggtcagaagagatttatttcagctgactgcttatagtccatgcaagagggacgtcagagcagaggaacataaggtaggaacctagaggcagtaagtgaagccaaggacatggggaatatggttgctccttcctcctgatttgctcagtttgttttctaatagaccccaggaccactgtccagggatgatagtactgtccactgtgggcaggacccttcctcaccaatcaagaaaatgtcccccaaagacttgcctatcggccagactgatggaggcgattcctcagctgagtctgtcactgatggaggcgattcctcagctgagtctgtctcttccctggtgactccagcttgtgtcaagttgacaaaaactagccagttcagagcattatccagccttttcttcatttgcagcattgacccgtggaagccccgcttcaccctcagaagcctaagacagtgtgccgcgtataatctggagaaaggatggtctcctgttctcagccgggcaccttctttcctgcttttaaggtgtcactcagatggccccttgcatgccattggcttgtcatgtccttgttgctccaccgtgagatctagactgtactcagcctcttgggtcgctactgtccatcgaggtagaggtttttgttttcataaatgacctgtgctatgaagcatggtttttcctggacttggtgtcttctgatggtcctaacaggatcactgtttatgtgaggttggcctcacctgtgtcctgtcactttctataaagaacatgactatgagatgaccagtctctgaagctgttgctgtattgacagaccaacgggctactcttagaggccaggaggtcccagcaatgctggagtgcaagagtgaacttgcaagggaggctttgtggagctccacttctgggttcttgggcttgctgtcagggagccgattgaagtcaggcactctgggaagtgctccgattttctgatctctggtctacaagtcatggctgagtgtccaaccctgactgtactttacaatctacctgagggtctcatctctttcactccctggctcagaggtcctagttgtttaagcagatggcaggggacctctctttgtgtgctcctgggagttagtcccagggagccctagttaggaatctctgagtcttgacctgtgtcagtggctgaatctctcatgggtctaagaattgtctggagggccctatcctaggtatctgatgctgatgacagggaagtctcctgtgagcattcttgggctatttaagatatccacagtgtaaacttgctattagaaagctgctgcgccacaattaattgaatagacaaaattatctcagaaggtagctcctgagcatttggggaattttcaaggataatttatttaactttttgctgagcttcaaatttctttaagaaaccctgccaagtctgtggggcgtgtgtgtgtgtgtgtgtgtgtgtgtgtgtgtgtgattttttttttggacacttacagctgcttcttcatgaacaatggtgttattctagggctattaaaatctggaagcctaaaattctattttaatctcttctcattgtcatggttaatttttttaaaaaaattttaaaataatgaaaccattttaaaagggagcccattctaaaattctgaccaaatgaatcagggcagccttattgtggggactcttagggaccagtaattcctctaagtagtaataattgatacccaaagaaaggaggagcgggtacctgctgcccccattgcccacaagagtacctgactgtagcctgcttccttgttggtcccagagtggtggccactgcccacccacctctcattgcttcttctaccatgggcctcagtgcagaaggtcaccctggctgcctgcctggccagtgctacctgatttttgtttgtctgtttggtttcctgcattggtttgtttcaggggtcagcagagagtcacaggtggcatagctgtttgtaaataaacaccatggtgctttgctgaccttgttttgaaagactgtatttgaggaatgcagctcagttggtaaagtgcttgcctgacatgcacaaagccttgtgtttggtccccagctccttataaactggacatggtatgccataatctcagcactggagaagaagagacagtgtgatacaaagttcaaggttacccttggagaccaggctccaggatgtgtaaaattctatctcaaataaaacaaacaaaaaaaaaaaaaaaagaaaagaaaagaaaaagaaaatcacatttcttttttttcttttaatttataagacagctttttaatcacaaagtatcccaaagaagtttagaaatgaaaatattctaccaaaaaccatagaagaaacagcagcagtaggtaggtggctcacgataaatatgagtccaggtcacctaccctctctggaggagcagctggcagtgctatgactggggagactgatgggagggccagccctggggtcagaggttggatgcagtgcccactgtcatctgccctggcctgctctcccctgggacgattaaatcagcacatgccgtgtggctttcatcacaagcttaagcagtctggtatttatttactcaaaggtcatggggcggcaattagcatttatctggcatttcgtgtgtatcagatgctgttcctggggctatgggcacatgagttcttattcttcacactgctctatgagacaggaacttgatggatgaggaaatcagagtgtgccagccttacatagcctcccgaggctgcgcagtcgtgaagcgctgcactggagttggaacccaccactgttggcgctcagggtagcagcgtgaacctgggagagtggggcctaaaaaaacaaggtggagtaaagtcccatgcaatagccagctttattcagagcatcagacagtttatactctgggggttaacaagagtcacctgagaaaagtgtacagtcaggaggacaagacacacatggcaaaaccatgcttttccttggaggagtaaacaagtaacaatagccagttgtaatgaatagtctgaagtgagctcactcctattcactactacacccaggaaggggacataagcgcattccaaaaacaacccacatcctgttgcaccgaggttataagacctcttgtcttagttacttagagttttctcacaaggtctcagagatctcacacagctttgttcatgggctatgttccaactcatgggtattggaacatttgtgccatgttcttcagggttaggttggggagggggaacttgcagtgtggagagagcatgccctttgtagaaatgcagtagtcccactaaggtgtaggcccgtgttcctatgcttttgcaggccccaatatggccccctatactgcctgtgcactcccatttctgagcatgcacatgtagactctactttagaggttagctggatggcttggcacgagttcagaaatgcagcactgctagatgtcagagagtctgtgactgtctcccttgtgacccgatgaccattaggggctttagtaacaaggatgctaacagttatgggtggtcatgtgtcgctggagtgaagcacatcgcttctcttaccttggttctcatttacttcttctccagcaactcattagcaatggcccagtccttgctaatatctcacgagtaagcaacactaggtaaccaatccatgttcatacagcagtgggaggtacagttgtcagagtccagagcccaccttcttcactgccacctgccctgccccagagaccagtcctgattggcatcacactcccaattcatacccagagcctctgactccctgaagggcactttccttaagcactttcttagatgcaaggacaaacataggagacctgtgtcacaaactagatagtagattgcgcattcagaataggttctctgggacaggttgacaaatgccctcaacccttcagatcctgagctatagattcctagctaggaggagtgggtggcaaaagtggattggagacatgccgacatgcctcaggcctccgctgttccacactggaccagctgttgctgccctttctgcccgcctgcttgcctgcctgcctgcctgctaggctgccctgtttgtattgctcttgctgccctctactgtctggtaatggaattgcctgtgttcaacctgaaggggtcacggtggctgatctgctaagagaggataagaagaaaaggaagttttgctgctttcgacaacgcagggctaaagatcacggtaacttgctgaggtgttcttgctctgtggaggctccttgcctgacgtttctggtttcctctccctgtgcataggcattgcgtgagctgcatgcgctgtgtggaaagtgcctatgttttaatcgcttggtttctctgatgcttggtcatgcttggtcttttggccttttccctcaaacgtgtggcatcactgagatggcacctttccgtttgcactgtgcctatgaagaagcctctgagccaactgagggagctcgtttgattcagtgtgaatattcttagcctggaagacacgcttggaaatgcttttccttgaatgatgcttttaagtttaaactgtttagaaattccaataatgttatttggctgatttttttttccaggctacatgtttcaaattgcttcttgggcgtcgctggctcatttacccaaggccatgctaaagctagtaatctcagcttcaagagtaagggaggtagcccccccccaaaaaaaaaaaccaaccaaaaacagaacaaaagccatctgggggcactcagttctcttcaatgagaatagccttatttgggaagtataaagttaaatataaagttttgtcctaaatactgttgaccgcacccttaccccgtccccaaccacttgacaaagcatccaggatcattaacatagagatgtgtataccaagaacagcttgcccagctgtctgtgggtcactgctgtagctgggaggcagtgcacgctttgcttggataccttggcatggacagcttagtgctgacaccaagatggaccccagtcagaaagaggaaaaaatctttgagaagacatggactgcagaggcagatagccagctgcgcgccagccgctcacccagaagagagatacacggcatggttttgttgcagtgtgagaatgctgagctcagaggttaagtggggttgtctgtgttagaatcctagcctcctcagaaggcctgaagaggaaaggcatcaggggatagtcagatggaaagcatttggctcacagggccctaaaagctcgagaaggaagaactctgtaaagcttgcacaccaatataggccaaggatgaagccgacctgcttgggtttagtatttacaacatgctgatgagtgccttggggcctctgtcaagagaggtaacccctcctgggggccactcacctcagtagcagcgtggcctctggggtggtttgacgatgtgagagagaggaagccatcttatctctttgaggaagctggcttcctggagtgaggaatggccgttctattgctgggaacacagaccgactctgctggcgatggtggggcaggaacctcggttgctgtgccacctttcccacagtaccacctttctctttctctaacaaagagagtagtttttctgggcacaactccaggtcttgattcagacctggaggcctcagtctgaccttgacccacatttcccaaggtgaatgtggctgcgtcatagaaatccctcgctctgtgtgagcaacacgcattagcacaagcatgtagcggtgccttcaggggccacctgggactttggggtttagccgtgttgtcacagcacgacgctgctcatgcttgccatgaaaatgatgcaaggacagaagagcttggggtcagacccctgttcctggggaaggagcacagtcctgccactgatgcgttatccagccttacctcttgcccccatcccttgggaagcttagcagcatcaggaagtactaaaagaaatccccaagtgtgggcgagagcttgtgctgagaaggggagatataaggctctgtgataagctgagtgcacacactgctcttacaggggtgggaagtttagtgtggggcaccagcactgtataggtcacaggcacctgtaactccggctccagggcatctaatgccctcttctggccacctgcatgcgtgtggcttacgtttacacttaacatagatacaaacatttttcagaaggtaaaataattttaaaagcaagccactcagagtcccaggacatctatgcaagcagctgctgtcgtgacagctttcagaaggactgcagaagagctcagtgtggcgtattgaaaagccttcttccgggctgctgtggctggagggtcagggggctcctggggctgacttaggctcttgaggagccgctcaaatgctgtgttctatctcctggatattaggcccggagaggacttggattcaggttcttctgggcaggccgcagggctcctaactcctgagtgggtggtgggcagtggcttcccagtgctgctcaggtcctggtctccttgaagggctgggaaaatgtcgggagacttcagtcctcaagggccagtagtgaaaccagacagctatgggtgtttctgttcctcctgagagctggtcaaaggtaactggatcttggaggagatactggcctgcggctcaggtaacacagacacaacaaacgcatgccctagttatgcgatgatgaggccaggctccccgactgctcctctgagtctttgacctcactgaaagaaatgacctggtgaattggtatatgccactccgaggtgctgcccagttgcatagactcatgtgtgtgtgtgtacgtgcgcatatgtgtgtgcaaatgcatttgtgtatgcctgcctctgaatttgtacagctgacaagtatggttgtgaaacacgtagtttatagagtgaaagttgatgaggaaatatctgtgcgttggttaaggatactaggtattgtgctagcttgagaaatgtccatcatttggttattttgtgaagtatagttcagagtggaagccaggcctggtactcctccatgttaaagaaaaaaacagtgacctgcctcctcagggagtggctccaggtagcgcctcgcctaggctgtctatgccaccaaggatgagctaggcagctttccaacatccccctacctgcagcggcacccaggttcctcccagctcctccccgccccccagcttctagtgctctccccagaggtccaacacctgaagtagaaacagacttgtaactcctccctatgcagatggccctagtgtgttcctgtagggggtgactggcatctgcaaacagcaggaggttctgagaggtctgcctaaaccctagcaaagccccagcactgactcctgctggggaaagaagggtagttactccataagatgccatggaggccttaggagaaatgcacctgtccccgggtttatcacatgaatttttgtaatccttcctgctttgacttttatagagttgcaatagtcaccagtacagcttgttactatctccaggaactgggcttgtctgctgggtgtagtgtgtagacatgggaatactcagtagcatttaagcttgttccaaccctgtggtatatcagcctacttaagcatctctactgaaactgtgggtatggtgtgccacacaggggtgcatcctgagtgggatgggagtgagctgactacccctgtggcaagccagctgcttggtcatctgggcactcacgtcctttgctgtgtacttccaggagcctcttccaacactgatggattcttctgtcttggtcgtttttaaagtgtagatgagaacctttgagggctaagtgcaggaaggaggctctactcagtcactagcatgaaagtaaatgtgcggtgtgtagccatggaggataaaatgcttaatgtggaagctgggcccacagccccgccccagccaggcccacagccctaccccagccagacctctgcagggggtgggtggagctgaacaccgggctacccagctctgcagagcttcggccccttgctcaaactgagggacctgatcaaggttcaagcacacaatgtcttcatcctctcccttccagagccctgatgacatcattctggaatagacaccacactcctggggaccctgtaaatgatggtgactgcagggttgctgtccctacaacatgctaaattagacagtaactcctcttaagtcaaaaaaaaaaaaatacacagagtggtagcccacactaactcagaagtatagttggctgttcacactagatgctcctggacagcaacgagaggggcctgggcaaaatgaccacaaattggagtgctttgctttcagagatcctccggagagtttttctgataccattggcagggtctgtgcttggacaccttgcccatgacctggagccaggactgacacccagtgtgcctcatcctgttcagtcctgactgacacccagtgtgcctacagcctgttcagtcctgactgacacccagtgtgtctacagccctgaggcagatgctcttaaccatatagatgaagacatggaggcagagagaagccaggccacaagtgggagttagatttaggactgataagcacatgatactctctggtactgtcctaccaccccagaggatgagtgggagagtctgaggcagggaggcctcctcatcctctgtgtagcctggcctcagggctccacagttcccagtgttggttgccattcacagtgtggggtttgtttcctgcctttctgcctgcacagccttgggaagcagctaagagtggcactctaagcactcagtaagagtggctcactaataattagcatagatccagagatgcagagtgatgtggccccttggtcacaggccggccgtcacctacctgcccccatcagattgtaaaatgaagctatagggatgaagagccacatcctgcactgacgatggcatgcatgagacctccagagtgcaaaagccacaagacttcttctgttcagaagtttacctttgaaaactagtaatgtttcaatatgacaaataagagaattgtgggggcacttaatatggacagaaatggccctgaatgtgtggttcacactgccattttatcactaggaaattgaagttcaaagagaggcagatgttctcatgaagagtggggcagatcagggcctggagattcccccaaatgcacagcacatgttatgctacctcagcctcagaaaccagcagctatcccaggtcacaaagagagggactcctggtgggatctgaaaagagtttccagtgtggtcttccgcacctgtcagtacaaggggcaacttgcaacaagctgctacaatgatattacagcctagtcttacagatgggagcatagaacagacaggagaagggggctgtgtgtgtgtgtgtgtgtgtgtgtgtgtgtgtgtgtgtacgcgagtgcatgggtcttaatggagtacttgctgaaggatattcctgtgtcagatgatgagacttcctaatttgtttctttccctgtgtcccgccccctccccccaccatgggttccaaagtgaatggaggtttgtagttggttgctttgaattcaaggaaaaggaacaggagagtcccaggagtgtaatcagttggtgttcatttggcctctgcttctgaaacctgggcctggatgtagctgctaagcctcccgcagcgacaagctcagcttcttgtgtgttcacaaagggctcagggacttccctttgtgcccttgggagacagggctctctgacctctgggtctatgagtcaggtcccactttctccttgcagtgagctttctctctctctcctcagcagggatggaagccacacagtcagtagagnnnnnnnnnnnnnnnnnnnnnnnnnnnnnnnnnnnnnnnnnnnnnnnnnnnnnnnnnnnnnnnnnnnnttcgtgcgggtagtgtaaggttctgaacactgggggctctgcctcaggaaagagatgtccatgagcctaggtagcttccccagcttcagtttgggcttcctccccctctcagctccactctgtctcccagcataatcaggcatctttcccaagggcatcttgcacagactcctgaggtagctccattcagggacatctgcccctcaccttccaggtgaccacatgtcagacgttggctctgggggatccagggacctccaagcactagtaggcccgttttacatctcttccccttcttctaaggatcctgacatggacctaggtctcagagacatcagacctgggactgaagttggccctgccctgctcgatgattggcaagagccctcacctgctctctgctccaaggctttccttctgctttcatagcgctccagtgctggcttattcaggaagtaccttccctatgctggccgtacactctcggtggagcttagacatccaatcaactgccacagactgagtggagctcctgacatttgaaaaacgtttatgcacgtgtctctatgcactgcctcctccaactgtaatagcttgtctttggtgtgctgtaaagacctctccatgagccgtgaactctgcagaaggggccagtggaagcattcccatactgagatatttgtataccttctctgtagtgctgtgatagagagaacaggcctgtgccaggcctgccggctccattcactgtgacaccatggcttcttttcttgggaagcatttgggtcaccagaattgtctcttgcaggtgatattggctttctctgcagccactgaaagcgtaggctcagcctggcacgcctgatagccctccttccggcatcctgagagtctgcacctggcccaccgcctggcatgtcatgccacagcacgctgtctaaagcacttttcttctccccacagctagcatgcccaccagcgagactgaatctgtcaacacagagaacgtaagtggtgaaggcgagacccagggatgctgtggaactctctggtgagtgtggaggctgctcagcctccctttaccccactttggagatgctagcgctgagagggtacccccagaggacagtggagtccttgggctctggaaggagatcagctgtgctccaacaggctgcctccagccctttggtacccctcctcctataccaggtctgctggggcatctcagcatcttgcctgcctctgctgtgacgttgtctgcctaaggcagggcatgggaagtgtgctttttaacccagccacctgctctgttcattaggtgctggtggaaaagaagaggcgcggccaagaccgggccctctgggtgtcggcggtgggggtaaaggctgatttctcctcccacttgggtttggtatctgtgctttgaaggaagagcttgaatggcagagttgctggctagaatgtgccacatacttaaatcttccttcacccatgggaccttccaaccccatcccggcagctggatccggaggtcccgccctccactgctcaaggccccgtgttttggagctgtgtttgcactgccctttcctgaccacgtggggcgctatccccttgagggttcccaggcttttctctagataactgggctgcagtagcagggttggggcagcaatgcagaatgtgccaagaactgcctgctttggggagcccggtgctgatttgacttgtttgcttcttgcctgcatcgtttacatcttattcctccaaaggacgggtgtcatctttaagagaactcaacctcatttggggcagaggttcataaatatgacacacacactattgggaggtatggcgatggctcatggagcgattcacccctgttctcctgctctgccctctctatgacgtgaagtgggctgggaatggatttgctgtccccattttacagatgagaacactgagctttgcaaggcatgctgtgtccccacccttacccttgctgtgatcgcaggagccaggcaggagcaacagttgctactgttgagactggggttgcaggccacagtggcccagcaaactggcttccgctagagggagggaaaggagaaggaccctgcaccggtccatggccagtccggaaatctgagccttctcttgtgcctgggcccttgggggtgctcctggcacaccgttagcaccttgacatctgctctggccttaaccaactggccagctattaagaatcagccacggggaaccagagtcctggcttctgtgcatggctttagccatctctacttcagtgatgggcacttgagctgaaccttccgcatgggagtcttaacactgttttcttccctttcagtcaggccatctcgaaatccaaactcaggtcagttctttcaacttgctttccctccctccctcnnnnnnnnnnnnnnnnnnnnnnnnnnnnnnnnnnnnnnnnnnnnnnnnnnnnnnnnnnnnnnnnnnnnnnnnnnnnnnnnnnnnnnnnnnnnnnnnnnnnnnnnnnnnnnnnnnnnnntccctccctccctccccccctctcgcccctccccctctctcgcccctccctccctctctcccctcctttccttcctttttttccccctcagagcttgcattacggtttttatgttatgttttaaattctgacttttatgtagaattggtctagacttgagtttaaacatggattcccagatttcagtcagtctttaagtcttacagcactgcctcggggagcaggacggagcatcagcttttaggcaggagcacatttgcctctttagcaaccctccagtcacttctcagaaagattctccacaaaagaaggtacaggagtctaaggcacctagtagtgttcagtttccagccctggatgcaggctgtgtgttcatcttgtaagtccccacatgcattttgtgttctcttcttatgtgttcttttcaattaaagacatttccctgctgtatgcaaacagtagtcataaaactaagaaataaaacctcaccctgtagaaactccgaaagaaaacgggagagaaagcactgtgaccacaggttagacaaagacttcttaaagatcattgcccaggacatgatccatatgagagaaaaatgatagattgatccccataagaattaaagcatctaactttattttattataaaatcaaaagaataagccacagacctgatcaaaatatttgcaagtcatatttgataaaaggctagatctaatatgtaatctaatatgtgatctaatatgtgaagaaaataatatgtagagagacagtattaatggcaaacagccctataaaagtggaaagaaggttccagcacacagttcacaagaagaaagctgcatggtatataagcaaagaaatgaggaggacattgctgggtgttttgggcagtgctggcaggcatgttatatgacacaatcattttgaaaaagcctttagtagtcgcttataaagctacagtaatgatatgacctagcaattctaattatacggtatctatgtaagagaaagaaacttacactaaaagtatatgtgtttgtagtgggtttattcataattattttaaagtagaaataacccaatgtccatcaaatggtacagtgagcagatcagttgtgatttatccatgtggtacagtacttctcagtgacagggagaagggagtgttactgagagggccactaagagggcttagtgggaaaggtgcttgctgtgcaagccaagcgacctgagttctagcgccagaacccacataaagatggaggagaagcaactcaaccaagctgtccccaacttccatgtgcatgtgcaccctacacaagacacacatatgtgcacatgcacacacacaacattaggttgttttgttttgttttttaattactgataatgttagcaatactgatgaatctcaaaaacattttggggtgaggaaaatgaagcctcgaaatgacacatatgatgattctggttagtaaacagcagtgagcagagaagacagaccagtagtcctgagctggggatggggcatgaatggactcacatgactgatggaagtggtctgtattccgactaagcatagacctcaaaaagaataaacctgctgcaagtaattttatctcaacctgagtctgaataaaacttaatgagtttgtcttagtcagggtttctattcctgcacaaacatcatgaccaagaagcaagttggggaggaaagggtttattcggcttacacttccatactgctgttcatcaccaaggaagtcaggactggaactcaagcaggtcagaaagcaggagctgatgcagaggccatggagggatgttctttactggcttgcttcccctggcttgctcagcctgctctctcatagaaccaagactaccagcccagagatggtcccacccacaaggggcctttcgcccttgatcactaattgagaaaatgccttacagttggatctcatggaggcatttcctcaactgaagctcctttctctgtgataactccagctgtgtcaagttgacacaaaactagccagtacagagttgttttgtgggtctctgttacaaaagaccacagccctgtttcctagtttagcatctgcctctcatcccctgcctcagcctttaacattcctctggactcctcccctgctctgtagccattctggactgacctgtcctcataggtgtcttgccttggtgccttcgtctccagggtctttggcctggagtgtcctccgtgaagactttcaattgcctcaggaaatctcttaatcattgaggtccagcccttctcttaaagctgggactagacttggtgtaaattttgcagttgtcatttgtccaccacccttcatgcctgtcaaggccaccaaccctggaactgtaccatatgcatctccagttaccggcaccagacacctacatagccagtgttcaggagtgcagactttcataccacccacacataatcgagcccaggagagtcaggctggtggtgttacacatttccaggggatacagcactgaggtcttcgatgttgaagtcacatgtagcttatcactgctgtacaaggtagacccaccaagcatagcattttgggaccaccttacttatgtgtatgggatcatgtatcccaggaaactcagctgtgagctattaagagtcctcagtagagttatctgtgccatttgtcccattgaaaactgcagagcagaataaaaacaaggcacaacttgctggatccagatctactcaaagcctgtcctttgcagccttcctgggttctatgtgtttgacatagcaacacagccaagtcagccggggctacaatgtagccagctggggctacattgaggcagcttagattttcctcctaagtcatacctagaggaagtgccctcctcccagacactgaggcaagcaaggccaggagaaaagggactttgcagcctggctggttcgttcctggattctaggtctgtggtccgtaactgtcctcttgtggcaaggagatggagaatgttttccacaaggagacaggcagagggagaaaatgtcttcctctaattacaaacagagacgggaaggtgggcggggacatgtcacatgtctgtttggttctgctcattttatttttatgaaaacacgactcaatattggatgttctcctaaaggtatattttgagcattgctagttaggaagggcacctggtgactcagcacgaagacacatgtcccactcagctttgacacctacgaggcgccagaggaacggcagagacctgagaaaggattaaaggcttccctaaacagaaagctatggccacggactgtttttctctgtcaaatcgtttctctgtaacgactaagctgctacacaagacacatatactaagctgagtggtcctgccccaccgacctccacagatcacaagctacacggtgcctacaagagcttcgtgtgtgtaccggtgcagccttgaatctgctcgtgagtctgtggatgtctgggttctctaacccacttgcaggctgcatatgtcagaccctgcagttatttatagccagcggaggggaagtgagagcacgattccttcacaattatactttttagagctatatgttcagaccagcagtttacatcatggggcctcttcttcacttctgtgctgctgggtcctgtctttcctgcctacgctatagagtcagcctttattactcagtaaagttggtcggcctctgagatgccatactcacccatggtctagggagcaacgtttgcttgtttttcagccgtcgatggcgtcgctggaaccggttcaatcgcaggaggtgcagggctgccgtgaagtctgtcacgttttactggctggtgattgtcctggtgtttctcaacactttaactatttcctctgagcattacaatcagccagactggctgacacagattcaaggtatggccggaaggtgttcttctgttctgaatttgagatgcttgtcagtagctaactgctaactgctggtcagtatccagctgtggtagaataagttagtaggactaactgagatggtaaagaaccattcagactcaagcaagccctgggacagatgtacagctcacaccatgcagtgtccgctaacttaggccccaaacttgagatagcccaggaccaaggaattttggaattgagaggcacttctccctgccatattggaagagttaccctcactttagtatatttggtcagtaattttgattctgctactttaagtgactagaacaggggtacatagaggccatctccaaaagagcccgttctagaccggacagtttagaattcttgagctgtccttctgtatattcgcttctgctactctcagcctgtgggacatcattttttgttacacacacacacgtgcacacacacacacacacacacacacactttggaactttggagatgactgggtaagcagagtaactgctgtgtaagcatgaagggctgacttcaggtccgcagaacacccgtgtgaaaagctaggcctggcaatgtatgtctggaaccccagctccttggggtagagaggatcactaggactagcttgggttcagggagagggtatctcgggggaatatggcagagatggatacagcagaacatgcaacatcttatctggcgccagcatatggtcacccctacatgcatgtgttcatcatacacacatacacagtcccccatacaggtagcaaaaataaataaaaactaaaacctgaccctagggtgctataagaggttactcatcaatgttggtttcaattgtttatctatttatttattttgtctttgtgtatgaggaagtatgtatggagataggagtgttaaaaaagcatagtatgatcttaatgcaaaatcttcaaagagtttagtggtgagaagtccagaaattcacatagtgagcacttctaccattttatagtcggtgaaattgagttgtaggaaaaaaaagcagaatacttgtacagactcatagctggggtgtgcccaacaacaaggatgttccccgttgctggtgcagcaaggagacaggataaggccatctacatctgccgtgggcactgataaagggaaggtgaaggaagacggagagccagagggagactcaaaatacaccggccccttgcctttccagacatcgcaaacaaagtcctcttggctctgttcacctgtgagatgctggtgaagatgtacagcctgggcctccaggcttactttgtctccctcttcaaccgcttcgattgctttgtggtgtgtgggggcatcaccgaaaccatcctggtggaactggagctcatgtctcccctgggggtctccgtgttccggtgtgtgcgcctcctgagaatcttcaaagtgaccaggtaaaggcgtgggtgcgctggcgtttgctcggctgtcccctccctcacaggaccctggccttaccccccttctcttgactcttaggcactggacctccctgagcaacttggtggcatccttgttaaactccatgaagtccatcgcctctctgctgttactcctcttcctcttcatcatcatcttctccttgctggggatgcagttgtttggtgggaagtttaattttgacgagactcaaaccaagcgaagcacctttgacaactttccgcaagcactcctgacggtgttccaggtgagccctcttcccacgctctggaggcactggctgcgagcggaagccagagagccttcttgggtctgtccagagcttagcaaggcacaaagattccatcttatcggtcacttcagcctcgtgcccctttggccgattttgtgtcatgtaagttatttgttttacagcgtcctccagccacctatgtgatatgacaagaagacaaaccagaacactttttgtttgattttgtgagcgctttgggagatagactgtaacatcttcctgctattcactagtttgtttgtttgttctcttaattcatgaggcatgtttgccatcctagttacaagagactcaagccaagaagtgaattttgaaacagcagtgaggctgtcctggtgtgtagtcagaggagtctgggtggtagaggttgtacctgcctctgccctttgccttgagtgagggtactggctctgaagctgattgcactgtggggccttggacaatgtctcataggggtcctgatgctggagaagtggtacacgagacacagtgctgcccatcagctggggtacactgagccctcctcccgtgcttggaagaacctggcagattggtttacagtggtactcaccttcccctccccctccctgttttcatgtgcaatcagcaaacatccagtagggctgcagaggcagggagcattgtgcaaagggcaagacatagtaggttatcacagtagcttttcctgtcctcgctgttgtgactttgatagatcacttatctttttctgaagggacagagcttagagagaatgatctcaaaggtatgtcacactatcatttgagatgcatagaattattgctataggccagggctgcttaaacattttgctgcttgcaaactttttttttaccccccaaaaatgttataatgttttatatatgtgtgtgtgtgtgtgtatgcacatgcatttttttatatataaatcaaacatttactggtaatgaattataaagattaaaaaaacttagtgcctaaacacacacatattttctctctgtgcctctgtctctgtctctctctgtctctctctctctctctctccctccctctctctctctctctctctctctctctcacacacacacacacacacacacaaagtaaaaataaaaaaataaaaagaaatcttaaaatcttgaaagtcttggggctgggagggttggtaagcacctgccacacatgaggacccaggcttggttccccagtccccacataaggagctgggtgtggcagtgcagttttgtaatcccagccctggagaggatagcagagcagaaacaacctaaccaaatcagtgagctccagccaggtccactgagagactccatcacaaaacacacagggaagagtgattggggaaggcgcccatcactgatgataactcacctacactggaatgcacaccatgtgaatggtatagacacataacacatgcacacacacacacacacatgtgcacattcacacatacacatgtgtgcacgtgcacacacacacacacatttgagtcttggctgaactctaaaagatgctgagcgcattcataatttttcaggttatcaatactttgaatttgcaattctcactcctagattcccacttttcataagtatgtacaaaacagcagaagtgtgtttaaggcctttagaaattattagaaattctgttccaatcccaaactgtaatttattttgcaagtttgtttaagcacaatccagtccaaagatgcagaaatctgactggtctctcccgaggagctatatatgataggtaagcagtgcaaggcattgccctgtgtgattaagtccatgtgtctcataagtgcagaagacttagtgtgtgaggtgaaatcactgctgctcacagcctgcagtagtctgcagcccaagccaagggagtctaggcagggcctgttggcatagaatggtgtgggagcatgcacagtgctaagtaggtatgctgagaattcctacctaaggctgcagggacattgtgtagtgcaccatgggccagtgctgccacaatctcaggctcattaaaggtttgatttgaaataaatttttgcttgctgcatgttctgaaatctcctacttttgccaggacttttctaaccccatgatcaatttagcaaccccagtgaaatcataccccatggtttgaaacccctgatagactatagtcttactttaaaatcatggcttctggtttgttactggttttccttatttctttcaggaaactcttacgcaggttttcttgtaatgttttcatatgacacaaaatttaaatgttataaaaagataccaactggcagtcctcccacccagccactaatcacttcctccgggtgggaacgggtatcccagtttcctgaacggtgttagataggtttttgttcacaggcgagagtcatcttacctgctcgcctatggtgattccacacatagagtggccaagtccacacgctgtctggcatcttgctttagtttgttttcatctgtaagaaatgggctcccctacttggttcacaaaaggttacacccttcttccaaacacatcatagtctgtaggtgtgttttggggggctgctactttattgggttcttatatataccacccttccaacccttattccaccctaatcccttcttccaacccccttctgtggtgtaggtcgctgatgtttctgtgaccagtccctcactgatgagtgttgaactattgcctgctcttgcgtatataaacagtgctccagagggtggaactgaatgtacaggatgcactggcacgtgttggagactaaatgtgtcagacatgctctccacgtggagctgctgggaaaagggcctggcttactcttgggacttctcacaatgtcctgcttctagtgggatctattcactctcaggcagcagtgtggagaccaccgtgcctcttccctttgttgagctaggtgtttgtagttcatgattgcttctagcctgacaggtaaaatggtgtctcttcatagttttattaggaataaagtcaagaaagagctcttttctaattatctgccagttgctgtttgatttgtctggacagaaaataaagaaactctcttcccagggggtagcattttttaaaaactgctgtctatatttatctggttggatttcggaatggattggattaccaggtatcatcaatagagaagatttcctttgaaactgatcatatctgttcttgaggtagtttatacacttgcacatgaccgaatgccctggttctgagaatgcacagagagattccctgtctctgcagtacatcagctatgtggaatactacgtatggagtaaaatgagcaagaaaaacctacttagtcagcgtctccaggaacatcactgaataggaaaaaagccagttgtagaaatatggtctacttcatgcttaaaaagatcagagaatatactagcggcctgtttctctaggtgtttatgtgtttgtcgattttaatctatagaggaaggtgccagacagacaggtatcaaggtcagttgctgtctagagagaggatagaaactagaagaaacactcttacttgaaagatcaagcaatctatagaaggtttaataggataacagatcagtttcattgtgagctgggctgagaaaggccttgaggggggacttagcagtgaccgaggaactcaggcagcacagccgtggtcgggagcttctgcctgttgtctgactccacccttctcttctcagatcctgacaggtgaagactggaatgcggtgatgtatgacggcatcatggcctatggaggcccttcctcttccgggatgattgtctgtatctacttcatcatccttttcatctgtggtaactgtatcctttggagccactggaactatgtggtcaccatcactgtctcgtttcttctgactttctctgtggttgtggtggtgacggtagcagctgtagggctaagggagacaaatgcctttccctggctagctccatgccagctttttatccatgtggcagatgggagccatgtagtatgagttactctcggggatacaagtgctcacaccggtgccagtagataatgagtgtagtgtcaggtctgcatacaggacaagcagggaagcctgaagattatgttgtcatcactgggaggctaggcctacatccctgtcgccccacgagcagtgaggagccactgatggtttgtcctggtcttgctttgctcactgctctctaccatgctgtgcaactttcctctgatgtgtttgattcctcttccctgatgagattcctgcagatggctgctgggggccattttgttcactgccaccagccccttcagggtctcgtaatgtttgccagttgtgtctgttttaactccttcgtgcctagcataagacctaccatgcgaagagtctttgtatcataattgtggctaatgagcatgtgtacagacatgatgacctcatgctcccgatttaaaaagtcctactgtgagtggctccctaatggtccagacctctggagctcattgctcccagtcttctttagtgcttatggtgaactttcttcagtgtagaaagcctagtgctagcccatcctgctgtctttaggggcagtgtttaatgctgtgagatttctggggaaactctctctgagtccttgggctcagttctagtaccctggcctccagagatatcctcaacccttttcttcctagttagagatgagctcactgacctctgactccccctcagattttatccatgtctgttggctatgtgtagagtcattgtccactggaactgtggtggatgccccctactgcaaccatccccaaccagatgacagcttcatgggccaggagtctccttttctgtgtttgcatgtttcctggtaagacagtgtggagtgtcccgtgaggacatttgtcaaatagatggtttttcttttctgttctcctcctgactgactgtagtcgcactgggtgctaggtttgagactgcagactgctccctgccattcctctccagctccatggtgaagctctctgtaacataggccaccatatgaaagccttcaggagctgcttgtgttggctgtctcttgctggaagctatactccattgtgtcctgtgtcctcccatatccccagtgcccagcagggcctggcctgcccagggtgctctgtagaatttctgaatgaatccacagaacacccctgttcaagaagtctgagccatgcctctgagtgcaggtggcaaactgatccggatttagatttgactcagcttcccacagatttactgtcattgcagagatgggattatttcctcctggggtcccttgagagagagacatgcttgacacagctgtccccagtgctgagagctgcccaagtcactgttgcaaaggctctcagtggagcttctaggtttcccatgttgtcagatggtttttccaagagttggtgtaacccacccaggtgtcttccctttttgaatgtcttgactagaattagacagcttcttgttgtgttcccctcacaatagtcttgctgttaggcctttggtagctttcaatgatggatgtgtatggcagcccacatggaagtttctaatatacagggccacagtctgctgcctgcctccctccttgcctgcctccnnnnnnnnnnnnnnnnnnnnnnnnnnnnnnnnnnnnnnnnnnnnnnnnnnnnnnnnnnnnnnnnnnnnnnnnnnnnnnnnnnnnnnnnnnnnnnnnnnnnnnnnnnnnncctccctccctccctccctccctccctgcctccttccctgcctccttccctgcctccttccctgcctcctcctacctcccttgtccctgctgtaggcttagggaaacagctataacgcacgtggattcccctcagacccgggcttcctggtattcataaatagtgaataaggaagtaaaccacttctcttgacttgatactcttgttaagaaaacattttttaaaaaaaaattctagaaaacatcacaagcaatgctatcattctgaaaacataaacgcttattcacccaatacattgccacttacaaaaacggtgttcagccatagtctagccacagtggggcccttcggaacatagcctattcttctctggcgggagatctagcttgccatttatagcaggtatctgcagagcaaagagcaggctctagcagccatgttagaggacgaagcctcctaatatattggacaatgagatcatcaggtcgatcccaagtggcctttgaaggcatctggtttgccatggaatccctcgagtgtgtatgttataacatgaactttcaaagagaaggaaaaacagtgtgctttgtgagcgtacagcggaattcaaacaaggggccgatgagatcgggtttccctggctctctggatgctcaggagaccctgcagagttttccgagcttttcacttggtttttaaagtgggattttaccaagttctccagttgtaccacgtgagtgttacccactcccagcctatgtgagcagcagagcgtggcactgccattatcaactacatgtagttgcatttaaaacacgttgtacccttaaagatttccaaattagatatcctgctgaatgtcttcttggccatcgctgtggacaatttggctgatgctgaaagtctgaacactgctcagaaagaggaagctgaagaaaaagaaaggaaaaagattgccaggtaaccttgtgttcaggaggcatttgcccagggatgctagggatgtccagccatatgtcctgatgggtctggggacacagacgtgcttcccaggagctggggccccttattgctgctttgcagtgattatggcgaccatgtgataccatctaaagagaagggactcctggataggagccaagccatcctctgagcaggaatggaagccacatatccctgtgtttaaagaatcactgcagtcaattttggtgtcataaattaagtgatgcattcaatgctgattagctcttggctgggaattttaatgaggtgatccgtgcaaaggctccgttgcatgagatgaacaggaagccctgagttagggttgtgctgtactcttggcatcatggtttcctgttgaatcttggtccttcatctatcacggtccggtcagaaccctggttagccctttaaggcataacattggtttcttgtcttcttttctctatagaaaagaaagcctagaaaacaaaaagaacaacaaaccagaagtcaaccagatagccaacagtgacaacaaggtattttttccaaaataacttctctgtgtttcaaaccgattctcttgcagtgtctccatcactataccgcttataccatgagagtgtcttaagtgtgatatttttttgtgtgaaatgtagaccctaccttatagaccccggattctgacaaagagctgactcactaacaagtcaccataagacgtggctattggagccatggactacttgttttgagttgcagttatgtggtcgggcataacccatggccacagctatgttagtatctccttagtgggtgtttaagtcagggtttttagcagacgactgttcccagagatgactgaagaagagtccaggtggtctaggaggcttcagggctgcaccagcaggcttcatcacacctgggacagcgctggatatttctgtgatgtgcttgttcattgaattgataaatgctgagtgacagttgcatggcaaacactaaactatctccatggagttcacagtctagctgagaggcaagaacctaaatgtggttatcacacagtgtatgtgcctaccaaaggatagagccatgtacagtgcccgctgaccatgacctgagtggcctatctcctgccttctggatgaaggagaatctccatttactatctctgcatggatgcgcacgtgtgtgcatgtgagcatacatacacgtgcatgtgtgtaagagccctcatgctgctgactggcaggctggtcctctggctttagccctctgaagtagatgaagtcttctccggtctctgttaccctaggttacaattgatgattatcaggaagatgctgaagacaaggacccttacccgccctgtgatgtgccaggtattatatgcggcagagaggcccagaagggctttcagtttggtatggaggggagggtgtcacacaactgaggccaccaaggcctcatgatcttcagagagcagttgactctgtgcttccctaaagtcagcggcagcacaggtgaatgcaattccaggaggcagaggaggaggacggacagacagacagacagacagacggacggacagacagacagacagacatagcttctgccagaacaatggctatgggatgtagaagcccaaaggcaagcgtgtctgtgactcaaaatccaagtttttcagcctaaaactgagcaagggggtgtagggaaacagccagacgctggggagtggcagtgagaatgtctgactgtggccttgttgtgccccggagggtgcctccttccacaggagcatgtccccacccccatacacatgcagcccttattctgaatgaaaagagaggctgttttagccacagaagcaggagttattgttaaattttaagccccattttaatgcaaagttgagaacaataacttaaacccatgtgcaatctttcacacctataaaaactgttccatttaaagtaggtgaagaggaagaggaggaggaagaggatgagcccgaagttcctgctggtccccgccctcgcagaatctcagagttgaacatgaaggagaagattgcgcccatcccagaaggaagcgccttcttcattcttagcaagaccaacccgtaaatactcccttcctagtcccttcaccactatctctctccaggtgactcttaaaagtgctgggtctggagtaaagaaaagtagttcccgccccccttctgatctctgaatgtacagggccccttaaggtcccctcctcctccttacctgtgtcaaccattcagccgcggggaagtgtcctgttcctttgggggtacaacagagtgctgggaggagcctgctctagaattcctgccctcacagcctgcatgggaacaactacaggagcctgcctagctcagtaagaccttctgggagggcctgtggctctcctgttgtgtacacgggcacactggccactctaggaccctttctgaacacatggatcttgttttaagatgctgtatggattgagaactctgcaggcaggttctgcacaacgtcttcattttcaggtcccatttaggagctcttttcccccctgttgagttttatggtattgctcatcacgctttatatgctatgagcagttgacttagcactctgatactgtgcttaaaatagcatttctcatagtaaaatgataaggtgcttaccaggaacgtggtaatgactcacagactgcgtgaggaagaagtctatttactagctggtttctaggtttaaatcatctgggattaagtgagctgccagggggagaggtggctcctggaaaggcttctagaggaactgcagaagtagttcttggccgtcaaggaggaacactgtgtagttcacaggcccagaggaggctcaggtgggaagcaaggcaggctggaggccttgaaacgtgacagtttcatgatcttttacaagattaatatgtcggtgttctgtgcagatgacaggaggacacatgtgccaccgtgcatcgaggggctagaagccactttatggatttggttattgattctggaattgtcaggcttcatacaaatctttacctgctgactgatctggcccacaccgatgatttttgtatagttcctcactgaacatccttaaaacaaacaaacaaacaaacaagcaaacaaaacccaaaatggcggctgtgaactgttactgatgcctgcagttcattgcatgtttatgtgtgtgggaggaatgggtccattttcccagaagtcaggagcatccctgcccccaggcctagctttggcagtgcgcaagtctttcaggaagtgcacagcacagagcagccacaatgggagacctgcactgaggggccaccatcatataaagtgattcttagttttggaaatgaaaagttacttgtccaagggcaaagcccatccatgttctttagtccacgccacagcagcagctgaccaaagaaaacgctgtaaatctgaatatcgagagggaggaggttgtaacccagccctgtgggacctcagtggagcaggagaggttctgataggccccgagagctgttgagaaagaattggatctggttgaaaggcacagcggtccttctcgattcccagggttgcaggattcagtaagaaacctaccatgtgacacaatgagatcctcacacgtaagcaaatgacaaggcaagttttgctctgccttctaaggactgcttgttgtggatcagctattgactaaaaaggtgacctttatgggcccctgagacggctcagtgggtaaaggtgcttgccaccaagcttggcagcttaagtgtgatcctttcagatgggcccatgtgaaaggagagagctaactcccaaaagttgtcttttgcatacacacacacacacacacacacacacacacaggagggagagtgagaaagacaaagaataaataaaagtcataaagtgagctaagaataggacatttataacaaactttccagacagcaggagacatcactaagtctcacttattacaggtcatatttgtaaaacagctgccctgtggacaaagatgggagtgtgtcccactctttgtgttaaaatatccttgagaagattaaattggacagcgtttagtgaagcacagaatgattcacagaggagcagccccgagagcagaaggcaagccattccaggagctgcggtgtggcgagagaatcatgggcagaacactgggatgagggggaagcagctcatctggccataacaccactgggccttactggagtgtggtctggttggttggcagcctgtgattggctgaggctcagctgtttgttaccgcagtgtcttcctaagttaggcctccagttagtagctgggttgtagttggttgtgtaggtagttactctagggacttcatttgctcagtttcctttcataagtcaggcttcatgctgtggtaggaaaaactaggggtagacatgcttggatctgaaatctacctctgcttctcagtagattcgttaccttaacattcttccatagccataaacctcagatgcctcatatttttaaactatttttatgtctgtgagtgttttgcttacatctatgtgtctgtactacatgtgtgtaatgcccacagaggccagaagagggcgttgcatcccctgggactggagttatggagggtttgtgagtccttgtatgggtgctgggaactgagctcaggtcctcttaaagagcagccagtgttcttagccattgagccatctctccatccccacttctggctcccatcttttggagggatagtaaccccatgtgcaaagactagatgcagtgccctctgtagctctcccagcacaaaacttctcacaccaaagtctgcctgtaggctccgtgggacaaattgtgggccatattgttcaccatgggtggaaaacaagagcaacatagacgccggccagcctcctcctgttctctcctgaaaaagcctcacaccttggaggaccccagcaggctccggcccttgtctgctccttggtccatgcggtgcttttctccacaggatacgtgtgggttgccacaagctcattaaccaccacatcttcaccaaccttatcctggtcttcatcatgctgagcagcgctgccctggctgcagaggaccccatccgtagccactcattccgcaacacggtaagcctctgagagaggagatgagggtgggaccaccctgggggtcagccccagcctgcctgtgtcaggcaccatccagacagcaggcccaagtgtgggaggcttggactagagcttcctgtgctcgctgtgtgtggtgccaggggttgctttctctggacgaagtgagtggagatgctcgattacaaagaagcctctataatattgctcgtgtcttcagggacttcttcattcctttcttcttactatggggtttcccgttccttactagaggcacactgatagctcattagagtcctaaggggaggagataaacttgaaaccaccctgagtaggttcaggaactctgaccttggctagtgaaagccctctcttatgtgaatttacctaaagctgcgcagctaccccactggtgagagacacagatcagggagaagacgtgagaccaagttgaaaggggcaacaggcggtagttacatctttgattattcacccagcgtcatagcttaaggatacacttctcattcaattttccctatcaggctgcccagagcctttaaaaaccaattccccttctcccccaaaaatgtaaaattcaaaggaagctaatgctggagaagtcagtgtatttgttgctattgttggatttgattttgtctcccaatggagctattttgagtatgaatatgttgcaaaagatcaccaatatctgagactattaatgatactatgttatacttgcagataggaacacgttgtcccctgaaagtctccacccagcagctgactcagatacagacatccacagcaaaacagggatagggcttggcactgatgtatctgtgttagaagatacttgtttctacattagtctttgcttcaggatctcttccctagcagttcatctaactcagcactgagcaaaggccaaagactcgttcagacagccatgggcccgttggccatcgcatctggatcttgaaaggcagtgtctgatgctgccgaggtactgcccgggagaggcagcataagcacagcctacctcttatgccagcagctcagtgccaggctttgtctcagtaaccacgccttcacgttatagctccccattccagttcctggcaaacctattggtgatgaaaggatgctctcaggagaatacggaagggacatttcccagtggctcagggagcatccctataaagatgaaggcagtgagcctgcctcaggccatcctcacagactcagctttgatttgagatcccccaagccatcttcatttagcatttaaacggagtggacacacacccctctgtccttgagctccatcataaaaatggagcacagggcaggagggtgtttagagactaatcatgatgtcacagggcaggggctagtgcaggttaagtgtgtcatcgtctctttcccagtattcagttccttggttttccttgtctttcgggtgtgtgctgctgttataacactacagagtttcattttagcaatagctgagtttctagtgacaaggggagtagaggccacatgaagaaagtacttaagtctaagaactgggattggcccctgggtaccacattagtgtggctgccaggtactttcagtgtgggaagagaggatgagggaaaggtgggggcagggggctgatagttgactagaaaatacacagttaggcaaagttgctctagcattgcctagtagtgcagaaatgggaagtttgggacagggttacctctgaggagagctcccctacttccatggaagagacgcacagctcccccttctgtggaggagaggtattgcatgctccagcggtgactcctataaaggagataacaaagccctcagactctggactacacccaccaacctctttgcctgtgactggctttgtggcctgagcagatgtccctgccctaggccaaatggtctctacagtccttccaacaccaatatcttcagttctttcaaaaccatagatgggctgctaagacaggtcagtagcaaagggcacttgtcaccatgcctggccacctgagatcacttcccgggactcagatggtagaagaaaagaactgatagctaaaagttgtcctctgacctttatacatatactgtggcatatgcatgtgtcacagacaataggtagatagatagacagacagatgcaataaagccacagcacacatatccatgagatcagcacccaggacaagcttgtgtactggcagttttgcctgatatctttccagttgagagtcatggggtcctcagcacactatgagtaagcttgttgcggtggttggacttcttgttcctggcccacttgccctgattctgagtcttagtggctctaaaaaaaatcaagaaccttgcgtcaggagctcagaagattttatagataataggtgacattttcaggaatgccaatagagcagcctatactaaaaattggaatgctacgtcagtatagtctttgcatggacccagaaaggccagagtcagccttgaaagaaagcagagtttacagagcgtggcaggaggaagacactaagtacaaatcatggtcacagactgagccatcccagcatatgtgggtgggttcaggacattacttgatgattacattgtccggggtggacaggaacacgtgaaattttctgacttcatttgatgcaattagcatttttacttatgctttttataattaaaaacagtagccatatggtgctgggaatagatccccggggccttgtgcttggttggcacccttgactccttcactgacattgtatttcttcaccaatatgaggcacagctagatagcagagcatttcattcaagttcaaaactgccaaaggtgtgtgagtctcatttatcaggtgctacaacccactgggagcccatgcagagggaagtttattaacacaagactttcagaaacaagtccctttgggtcacaataggagcctgggaagccagtcagccgaagtgggtaaaggaagccaggctccccaacattccttggtggttgcaaagacgagctatgggtgggcgagaggggtccttctgagtgtctcagccttcccatgggagcagcaggttgtcctgcctggagaagggcctctggacagaagctggcggttctgctcttgggcatgaatctggcatccttgggctgactgctgtgtgttgtgccttgcagatactgggctactttgactatgccttcacagccatctttacggttgaaatcctgttaaaggtaatacatttctccttgaccctcctctatgcagccacagcagtaatggttgcgttctttgcctcccttccagatactaggttatgcggactacgtcttcacgggtacttttgcttttgagatcattttaaaggtaacaggccggccagctcctctgacctcggcccctcctgtgcttcaagcacaggagagatgcgtgaagtgctttgagctttttttttttcttctgtgatcaagctgaacttttttaaactataggatttttttttcacctgtggccattccaacgtgtttttgcagtttttctttaactttgagtgcatgtagaagctatgttggcttcacattctagttggaattgcattttgttctttaaaaaaaaaaatcctctgaatttggttcactaataatggatatagcactctgtgtgaacgtccttctccccttcctgacatcagagtgagaagaaaagcacctgtgaggtggcaggagacactgtccccttgctcctgggactacatggtggcttctgtgtccttgaatagtaactcactactctcttgcaatgggtcttgcaagctatgctgggtctacttgtgtggagatgttctgtgtctctttcaatgggacgggcttacatttgcacagagcaaaggtgtatctgaatgaactgcccgtgcatggcctaccaggtggtgtcactgcgtgtgttgtgtcccgactgtgagtaccccatgggggagttccttcctgagacacagcagaggtctaggagcctccagaagctaagccttcagatgctgttgttacagccaactccttatgaggagaagctgggaaatgaagttactacagttgcctttgaagtattttgaggtttatgtgtgtgcatctaaaacaagttctttatgttgggcaactagggactgggctcctcacaaaagcttccactgacaaaaccccaattaaggaacacagggagttgccctgttgtggcactgatgttgccaatgcgttcaaaaccaccctttccaaatatgttcaaatcttataaaagttagggttttcttgcctaactgtaggtcagtgggtttggttttcgtttcctctacactggggctgagcagagcagtggccaaggcttacgtggtaaaaaaaccagcacaaaatgcgccaagtccctgctccaggttcttggtttttgccatttgctgcctctccctcaagctgaattagggaatgtgttccatagagccattagcctggttgattgagtttctgcttttctgtctgcctgtttgaactgttactcactctgggctttggcaaataaaagcctgggctatttaccactgttttggttttttttgttttgttttgttttgtttttttgttttgtttttttatggcttttcaagacagggtttctctgtatagctctggctgtcctggaactcactttgtagaccaggctggcctcgaactcagaaatccacctgcctctgcctcccgagtgctgggattaaaggcgtgtgccaccacgcccagcccactgtatttttcccaccagagaacttccttgttgagctcttcctatcatcagtagaaacctcactatgtgtgttgttgctaaacaaggtgttcagtgggaccaagactagcttggccgtaatgtcacccaacagcctgcttgctgtagccaatgcttagagagtaaccagagctgggagtgtgaaagccactaaggctggaaagtacatcaggagttctggctcccaccgagaaggttcaatgaaactcgtttgtgctctgtggccttagagccgtcagaccagcactgtataggtaagctcgggtgtgaagcagtgaaggccttcccacaaacatagtcaggagcagtccctccctacacaggctttttggacgtgccagagttctgttcctatttgaataaactctgaattggtctctttacaaatgtgcctacacttggctgcctctttccatctctgctgaaggaagttacacagtcactcagccctgctggtgtgcatctgtcttccttgtgtgcagccattaatgaggtcatacttctgccaagagtttgggaagagcccaggtttttgctcggttggttttgaaccctggaggggaggagagagaataaacgccacgcgattctgtttacagatgacaacttttggagccttcttgcacaaaggggctttctgcaggaactacttcaatttgctggacatgctggttgttggggtgtcgctggtgtcctttgggattcagtaagtatttatgtgtccgtagagtgagtttacatagggaacttagacctaatttgctcaggctgggcactgtctgctgattacagccagaacggcttaatttgccctgggccagaaagagctggggccatttgtattttcctatttctgttttccttttctgttttcttttttttttttttctttttccttatgcctactgctaggttgagtttatgattctcttcagaattagctttcaacagcagatgaaagaaagacagtttgactagtagaggacaaatagggttcttctcaggcctggtccaagacttcgagcatcctttctcagggtggcagttttccttcactgcaggcaaagcttggccttggtggtctcttgggatcccttcctctccctgtgcttgcaggatagacagctgcggtgaccttggggacacttaagagtctctggtgaagctgaacactgcctttttaccctgtgcagtacccggggcagtcacccgagtttgtgtcttctgtggcctcatttcactttctgctggcctgtgagcttctgtgctcccgagctgtcccatgtgtgcacacgtgtacacagccccttagctctaggaacctgaagagaaatgtaagccaggcactgggaaaccacagaactaggccactctgtgggaagaaagacagtttatttgggaatcaaactcctaggctgtatctgaggtggtcagggggtcaggccgaggggcagagaacatcgggctgcaggaaaagccttgtcagctttgtggggacaggtagtgataggagggtgggttcgggcaaggacagcctgagagttagcaaggggctttgttctgttataggctggtcaggtaagtcagcagctacatgcccattgtctgttgaccatggggacagataaaggaagtagcagcttttcctgactgactaaagcccgctcctgaggagtgctaagtttagggttttgtttatctgatgccagtccttctgtttacccagtcagagtccagcctgacattgtccctctggccgatgcctgggaacctaagctctgagctcatttcccggtagaaactccagactagtctcttcacggctctgagctgtccacactctttctggcttctcttctttgcacactcccccatccccaaggcctgtgctccagccacacccctacatctggggtgctgaggctcagctgcctcagtatgcactgctgctgcccccctctgtcagctaactctctgctcccttgggactcacttggcaccacctccctgagaggccttctcatctgcccctgtggtcacaccatatcttccccaccttggaggagcatactgcaattccccacccccacccccaggtgtgcgtgctcacccctcctaccggatgtagctacttgaaggccagaaaagctctggtaccaaagcacggttccccagacttaaacacgaaaatctagaagtcaggaacctagtgtttacatgaacataacaaagtttgaaaatttctccaaaaaggcaactgtaagcctaaaataggggctctgtcaggtcccacaggaggcaggaggcccgctttatggcataaaggagtagagagactccacacagttgtgaagtgtctttaagagatgatcacattaagcaactgctctccgggctcctaaccagctgtaactcagccgcttgcttgctttgtccctccttaggtccagcgccatctccgttgtgaagattctgagggttttgagggtcttgcggcctctcagagcaatcaacagagcaaagggacttaaggtattgaccctctctgttgagtggggctgtcttgggttggggatggctgcagttactaactgttcttgtctggaggtgaactgaggcctgctgggtttcagagtggaacaattccaccaaaagaaaaaccaaaaaggctgcttctgccacataccatcattctaaagatgaaagacaaaagactcagtaggtaagaacacttgctgagccttagcgcgagcacgagcatttgttcggagctgagtcagctcccagagcctgtgtaaaaagccatgcgtgttctcacacactggaaaacccagcactatgtgtgaggtgcctgagacaggaaggtgcttcctggtggctgttcttgctctgggttccgtgagagtctccatcttaagagtctaaagtcaagactgatataggaggacatgcaatatcctcttctgctttcctcaaagaacaggtgtgtttgtgggagcatgtacccacataacatgtactgctacacacacacacacacacacacacacacacacacatacacacacacacacacaccagaaattacttttttttgttaattggagatattagtttttataattacagtaattattgggtacttctttctcaatactttttcttgtgtttaagttgtaaatgttctcatgtggagtacacaccaggctggaaggtttacatttctgtaaagtctttctgggatggggagcctatgagcaggaggggtttctttcaactaaaccaacttctttggaggaagcccaagaaaggtgttttgggggctcagcaggttaaggcgcttgccactaagcctcacgacctgagtccagtccatggacctcgtgtggaagagagcagcagcttctggatgtcctctggttccacactcacccgtgcacagtgcacacacatggagtggataggtgcaatacaagattgataaaaacgtgcacgtccaattgaccacaattctcgcaccgtggattaccaggaaaacagagcatgaggttaggacagttagaaattcagctcaaagtgcgtcttgacgtagaggccctggcctggtgttaactcacctcacggctaaaaccaggggagagaatagcagccccccatcctctgtgtgtgttccttccccagcacgtggtccagtgtgtctttgtggccatccgaaccattggcaacatcatgatcgtcacgaccctgctccagttcatgtttgcatgcattggggtccagctgttcaaggtaggtgtgtgtctcgcccagggcgggagttgggttccgtaaggagagcctgtattgacgttctgtctgcttggtatctaggggaagttctaccgttgcacagatgaagccaaaagtaaccctgaggagtgcaggtgggtttcccaagagcagcctagggaattggatccagtcagcttagcatttcagaggtttctgtcaaggcctatcccctgagctcaggcctggaaggatggcgcttggtcttctgtcatttgtttatattttcaagtctaggcaaaactcaagtaaagtaaaaatcacgtctattcagtgtggtcagtcattgtttagtcagggcctctctcaaggtttgaaacatttttatcatcccaaaagaatgtaggtggctctaactccttagtatggagcctgtctgctgggggaaggagccctgaaataagtgactgagggccacccagtatctgaggaacgtgaacggtactctcccaagtcaaacttgcagctccactcccagggctcaggagtgggctgccctcttctggaagacttggcagtctttgctccctggtcctattttgattcttacccatattatggcacatttctcttcacaaccgtcaacaaaggagaagcagcaagaaatgtttgcatatcataattcaagatgctcggcaaacgtggaattttcccagtccatgcatacgttacccagagcttatggccacagaaactcatgtccttgacctttagagttacatcctgcaggggtctagctgcctgccccgtgtgctttggtttgggcttccttgaataaatgacgtggctgtggggtgtcaggtacagtttgtctttgactacatacatcttcaaagatgctatcagccccgggcagggggatgcagagcaccacacaagttgattagtgcagccacagtgtggctatgcaggtccttccctctagctgcctgttgttaggaaatgacagtaacgggctttatctctgggctccatccacaagtacagttctgtaagaaatggtgtgtgacagcagttacagaattgttttggaaggaaaattggtaatatcaatggtatgtaaaggaagagatttgttgaaactagattgtggacaagcagataccccagcttgcttctcaagagtttatggaattctccatggccaaagtattgatttttccacatgtgttcccagcctgtcttatgtgagaaacaagttaccatttggtcagagctaattgccaacgggtccacactgtttgtctagctgttcctgccccagagagcctactttacactagacaatactagggatttatttgagctatagagcagattaaatgtgggaaaagcaggggagaaactccacctggcctgtgctcaggtacatggcctggctgagactacatgtaatgttctagcgtgggactaatactgtcatgcgtgaagccaggatgactctaatgcctttcctctacagggggcttttcattctttataaggacggcgatgttgacagtcctgtggtccgtgagaggatctggcaaaatagtgatttcaattttgacaatgtcctttcggctatgatggcgctgttcacagtctcaacttttgagggctggcccgcgtgagtatagagaatgttctatttcccacaaggtccgtatctgctccttagcaactccatgctgtcttccttccttgagcaggtgcgacttttgctcttcacagctagtgagctagcctgtgactaacgctgggcaaattgtcatcatttcttgcccatcatggctcctccatctgaacaggcaggtgttaaacatctgcgtctttcttctgggaagtacctgggcagcatctctgggtgtggttaaagaggtcctaagagacatttgttgtataaacttctgttggtagctgcccttctgatgctcttaaagaggatttgacagcatccaaactgccattcactcttccactcatcttgatacagaatgagtattcatgtgtgtgccagccatgggcagttgccacttttctttcatggaggtgcttatacattcattcataaattacgcctttgttgtaaaccccatgcaatatgctgtgctagacaatgtggaagatctcgaatgtttgaggcactgtgcttgctctgagccctgagcccagagctagtagaaatgtttcatagacatacttagtacagaagagaatctggatgcgtggctgggatctggctgagtgtggatcccagaacataaaaaagaaagaaaagaaagggcaagaaggaacctcggatatccttctacctttcttcacatgccccatgcccagaggagcttgaggaggggagtgcccaggctggttcttgctggctgccagggttcagttagccactgaggcagctgacaggatgtgaaccagcctggggctcagagctacagggccagagcctagccctggactctgctgctgagcattggtgaccttgtgaccttggcactcagatgcctttctgaccctcgataaaaagggagtggtggtgatatctgccctgctagagagaagtaaagatgaaaggagaggatgtgaatgcctttttaccatgggctggggtcctgggctgcattcgagtgggctagtctaagttggggtgttttatggtggtgcccttctccagagttctgccgtatgttggaactttctgtttgggtgcagggtatctgtcagttcacacacaattttcagttccttcagtatgtcaatgtgattcactttatctcttatctcttcgtgggaggttgcattgctgactgtttgtgaaattcttttgatttctcagttctccagatattctttgaatgattctatctgggtaacctctcatcaacataccagctgtctgcgcctgaggcctaaggcctcagtgacccagctgtgttcagaggccttcatgtccctcccccaacacacacagtgactgtgcagatgaattctgggagcatcaggcagtgcagtgggctgagctacttggactgtggggttgtggggctcttacctagttttcctgtcctccaggttgctgtacaaagctattgattcaaacggtgagaacgttggtcctgtctacaactaccgtgtggagatctccatcttcttcatcatctacatcatcatcgttgccttcttcatgatgaacatctttgtgggcttcgtcatcgtcaccttccaggaacagggagaaaaagagtataagaactgtgagctggacaaaaatcaggttaatgtcatacactgtttgtgcttctgtccctcatgcaagagcagagcacctcctccctcagtggccttctctacccagaggagagggctcaggccctgttcagagcacactgtcagccacgttgagtctctgtagagttagtcaccagacacagactagactattactggggaaaacaatccccacgcttgtgatgagtaattagagaatgctgagggtataacccatgatggtggctgaccggtgatggtttagactcttgtgtagtaggtaatgtggctcagagcaggagttcactcatgtaagcttccacagtcccctatggagaggctcttcagcatatactcgctataaactttcttcatctttgtgttcttcatatagcgagctgctcatttgcatttgtgcttccaaagcgcaactgtagggcaggaagcaaaatccgggtcccctacccactcaacacactggaatctatttcctccagtagggaaagaaaatattcccagagattgcaaggtgtcttttagggaccacaattgccttcaactgaaataggctgtcacttgataggaagagtcagaaactttgaatacggcactaaagttgttggcttcatttccccttcttgtcttagctgatctggtagaagtaggagccttggctctgactatgataaagccaggaacctgggagcctgttctctggccctgctctgctctacctgctctgtgacgttaggtgcagctctgctcctagggtcttgtccccttagcttgtttagaaataatttatgatggaaagaaagaggtgcccctagacattcttttgaacctttagcatatgagattggaagtctcttctgagagactccccactgtcttttgtaaggggcatctctgcttttatggtaactagatgattgaggttggtctgggagtgcatgcttattaaagaggtggccatggccttaggaggtatctctgcccaagtggtacctgggaatgtgaagatgggtgagttgacacagtttgtggaagaacttttcctatgccagtgtgtccttgtatacactaccagtgataatctgggggaaatctggcttatctctttgcctacccaagtgagggtatagccaagtgaactatgcaggggtggtggtgtctttgagaaccccaagtcccaaatagtcttgaatatggtgtctctggagtcagagtgacactgagtcacaaacacagaaaacttgtctgaagcctgctgtgtctagagcacagatgtgggggagcagggcagggatacgccttgagatcaactggaggctccctcagggccggctccagacagagactagtgtccgtccctgagtgagtagaaggacagtgttctgtttagagccaacctcagttcgacctacccttcattactaaccattctctggagatgctcaattgagtgcagtaagctcccattcccgtaagcctggacaggcatcttctgtggatctgctagagtatccagagagcctccaacctcaggaagtaaactcagcctcgaaggctcttgaagatttcatgcctgccactaggtggcttcctcttgtggacgacctggtatcaccacctgctgacagagaggaaaggtcctaacaagacttgcttgatctaagtccccccaacacccacccctaagagaccctgcagagcctcagcaaaatttgcctgagttgtgtctacaggtcccagccagtacagtggctgctccacttacttctgaagtcaccgtgaggcaaatgctagattctcctcaagaccccatggggcttcttcactgctgctcatggtcacttcctggaaggccagagtgagctcttcttggaagatgccactatgtgctccttccctggaagctctcaaaaccccctcggttttttttatcatccttttctacctttgcagcgtcagtgtgttgaatatgccttgaaagcacgccccttaaggagatacatccccaaaaacccataccagtacaagttctggtatgtggtgaactcctcgcctttcgaatacatgatgttcgtcctcatcatgctcaacacgctctgcctggccatgcaggtaagaacggagatcatggcgggagccaggtctaggtgtgccccacgtcccctctaccccagagcccgacagcagcatgctgcacctcctaggagaaggggtctgactttctgataatcctggaccagtgtggccagaggtctgctctgcctgactgttgtcacggcagacacataaggtcacgtttctccgcctgggcagatggctgtgggtattgctcccatggaacctatgtgtgctattcagtatggatcgtgggacccaagagcaactgagtaccaaagccccgatgccatgcagacctcagcttctgccctggctctatccttaccagctggtggtcatgagagccttacttcacgccacactgtctttatgagtaacatgggagacctgccacatctacctcagggcaaaggattccgctgaattcttcgagtctggcactttgaaattaattttagatattttaatttaattttacgtgtgtgagtgtttgctgccatgtacgtatgggcaccatgtgtgagcctggtgcccacagaagtcagaagagggcttctggaactggagttatgggtaacggtgagccatcgtgtaggcgccgggaaccgaacccaggttctctgtaagaacaagtgctcctaaccttcaagctgtctctctagccctaaagtctgacactttggtctaaacctgccccagcggcactaaatattgaaaaggaaaaccgaaattacattcctgactttaggggctcctggtgcggtagtgcgtgatttcctagtttttgcaatattgccctgaattacagcaacttcttgctgatcctgaccaagtcagattgcagagcagtgatgacagtgaacctttaagaagttattgtctgatagatatgacactaggtcaggaagccaggaccaaggtctacaaccagattctgtccaggcttgaagaacttaagcaattcaaaccctccgtttctcagtagaagccaggcccatagtcaagcaacattttcagacactgttttacactttataatgaaaaggtctgtgtgctgatctgggggagagtgtgaagcccagtaatactccctttaatgagacataaacctaaatagtataagatttatcactactcaaactctacctttacccatcatatctgcagtgtgttagacaaggacctgagagatattcccaacagagaaagggtggcttccccttatcctgaactgaaagaatgggcatttatttcctccatcatcggaacatcctcattgtgtcatgaaccaccaccaccccccacaacctccccatgtttaggggaagttcaccatatgacctttgcagtgtactggcttgaatgttggcagaagatgctgtacaagagggtgggaaatgaccctggggtgcaaatgtcaggggatctcccattgcacagatgagatcgtgaggttttgacatcagtacctctgccttcatccacagcactatgagcagtccaagatgttcaatgatgccatggacattctgaacatggtcttcacaggggtcttcactgttgagatggttttgaaagtcattgctttcaagcccaaggtaagttgctggccctgctttacaaaaaagaagggcctgcttcctttcagcctcatgttactgaattatgctaactcttctgctagctaagtaggctaccatctgagaacatcaagatctgattaggacgtctgtatacatgtgggaaaataaatgcgcaaaaacccaaaacccttatgaaaacagttctgagaaaaagagagaagagaattaaggatctgtaagctgatgatcattgtaaaacctggttttctgtgtctagaatggtatgtcatgctgtctcaggaaagcgtagctcattatctgagcactgaggggttgtctgataatcatcagaaacaattgaccctgatttcactctgagatctctagcaggaagacagcttctatttgttgctgtctgcggcatcctttttttttttttttttttttttaaccgcgtatggaaagttctagtacctcttactcgtccaccatattttgttgttgttgttgttggatttagaaaagtttcccttgcttgtaagaaaatgaggcatgacccatgctacactatgttgaaggaatgcgcgaattgcgtcttctttgggagggatcagttctgtcccacgaagcctgaaggctgtgatgtaacaaaccatatagctcggcatcaaagagcataattgtgaggcatctgagataagattctgctggtttaaatgagttacttcaccgcccttttagctttctctctgttctatgaggatatccatagtccaggtgtaggggccgttacataccgtattgaaagggtgcctgctatgttgtgctgtactggagaccattgctgccacagttacaccgtcaccaccatcttcaagcaatggtatgccttcagtctaaagccctagactgaggagctgagctgagctgactagtggggtctccttcctcgaatagaccatgactctcagaagagagaatgacagagcctggtcctaggtgttttcaatctgtgtggaggtagccaacaaacacggcttcagaaatggttggtttcacgtacgctatagttatacagaatttgaactccatcctgggcctttctttaatttgaagtaaatcttaggcaatctttaatcggatctttgtggaccgaaaagaaaggacattttgtaagtgattaattgcagtgattgcagtggggtcaaatttggcaccttacgcatggctagatgttacgtactgtgacttgtccatacataaacattccctccttttccaagtccatcagatcctccttggagacttgggtttgcttctctctctcctattcttctttgaacaatatttgtctgaactgatggaagaggttgcagagcgagaatgtggaaggttcttgagaaatgtacatgagacattcccatggaacatttcccatcaaccctgtacctggcaataaagctctgcaaggtttgagagcttgtccaggttgaggagaacacacacacatcccacagcatgtgagcatgtaagagtgtgtatttatttgggtgcatatgtgtgtgagtatgtgagagcgtgcttatatgcacatagccttgaaggctactacatcagtggcttggcccttttatccttggtccagtgagtctctaagcctgggaagagcactcagggtcacgtgaatggatgagcaatactgttggaccatagaagctaatatgcagtcagtactaaaagaccagagtttttatcaggtggttcctccagcaagtgcactgctttgagttttgcttaacaagatatcttcatggcctcatatgacctcagattgtaatccagagaacctttaaaataacagcagcacccttgctcttggtgagcagtgtttcaatgatgacttatattgctttgtgcatgacaacggaaggagaacggagtcgccaagacatcgctctccctaaagtcccccctggcctttaatacactcagtgcttaccagccaagcccagtgagaggtgctctcacaaagcagccagtaggggtacctctgtcctagttagtcaggtctgaaggctacctctctacacttagacagtccaggactcggtggcagccatgtccagggtaggctttcccacttcagttggcccagttaagaaaattgcttgaagacttgctaacaggacaacagaatccagagactttctcattaagatcctcttcaccactgagtctaggttatatctgattgataattaaaattaactagtgatctacagactgagttacgggccagccagaactatgcagggaaatcctgacttgagaaaaaccaaccaaacaaactaaaaactagctagcatactaacctaagtgtcagattcaggaatatttctgaatattattataagctgttgcatgaggctaactcactcttttcaagcagttagagataaagaaaggaaggcagacagaaagacaagacagaaggaaggaaagaagaaagaaaggaagggagggaaggagggaggagggaggaagtgaggaactggcttcagagttcagttatagaggagtgtgtccttcagctaggagggtgggtggggatggacgctgtgtgacaaaccatggtgtctttgatgcatgacgggtcgaggagctgagtcatgctaccaaggtagtgatttcaagagataggaggctgctaaacagggaagcactgtgtgggaagaaggggtggctggcatttctgccccccctggctcctatcagtgccacctggcccaagcctctgacaccagccacttgtaccacgaaacctcctgtggtgtagatgagagactatcaacctgtagtctgtgaactcttaaggatctgggcaccattttgaaactgtgaaaggttttcttagtctatcagatttccaaaaagttcccagcaagtgtcaaatccttatcttgctgatttgaagggattgtatcccccacactgggccaggaaaggcttcatgaagaacacagacaggactggcccatggtgggaactctgatcatagtggagacaaaaaggagctacaagaggaggtgctgcgcaaggccccgaggcaggtggctcccttcttgcagatctgtcaggcaagatgagagaaacagagcttgtaatatagggccagtcaggaagtgagggaagggggcttaatctttgaagctccatgagtgtttttgtagtcttagcattgagttgaggaacagaacacactccactctgcaggagaatctgtgaggaaaaaagaacaaagcaaaacaaaacagagaaggacatgtccatcagcatagtctgcagtgatgctgccagttacagaactttttggtactcgcttgcaaccgtataatctaagagtattctgtgatgctggaggtgtaccatgtgacccagctgccctgtgtgtcagaagactaccttgggagcggagcagaaaactctcttgcattctagactagctccttatcttgcctctgaccacatgttttacatcacaaatccatacctcagggatgcctggtttccctctattgggaagctaagaaggtgtgacctgttcttctgagcaaacattcctgctgggtttgatgcaggacaattttgactatccttgaacttcagagaagtgtttgagtgccagccactgagggagcaagtgtgagagacaccatggatgtaaaggagaaagagagtagatcagaagtcactgaagttgaggctgggagtctcattgtcagtagtaacaaagggaacagtaagagcagtaagcctcagtcagagtgaatgccatcctgctgccaaaggatgggagcgctgttagtagtaaacagaaagaaccccactctggggttaggcgtcaacacgtctaccctttccacagtgcaataaaacgctgtgggtctgcagagacttcctctagccctgcagttgttcataggttccaggcctcaacacgtcaaactgaacgcttaattcagctgtgaggatattcactgtacctgtgctgggcccctcttttctagaattcagacctagatctttattcttaaaacatgtgctgcctattcaagatacttatagacagaccttggcaggacagccctggcagcggtgagcctgtggctctgtacagactgtacccacctccttcagtgtggcttcccaggggtgtcaggagtcaacaggtgccagctaggcatgtagtgcgaagagcctagaaaacataaatacacatctgaacttgtaagtcacaagtatattagaactgatacaagatactaagacctaaaaactgataaccaggaaaaactaggatacagatttgtggagaaggatgtgaccatggtctgggtgactgacagggttgacagaggtgataacagagtaggctatgttgtcctcatcctgggaagctttggtgtggtggaccttctggatgaaggaagatgtgatctgggaaaatcccatgaaagactggcacttgtctgaccttagaagaggaagtagatctgagctgattgtggtcagaggggttgcacaggtgtcaggagatgggaaagagccagagaagttgttgggggaatttagaggagttcgcttagcctggaagagggaaagaacatagaaaaccagggagggtagaaggcagccattagccattagctgactgggatccctgacgctccctcttcacccccagaactctttctcccacagaacctgccttggcttgtctttagtccacaatggagagtttctctgctgcggggctctactttgaagcccggtgcatctctgtacctgtctctctataggctgtgacctttagacgagcccctttgtgtcctttaagccaagagctcttaggaatgctgctgcacctcatagcctgatatctttgctggactagtgaggagggagggagactgctgacctggtggcttcaagtgggaaaagggacaagaggggagcttagagactctgggaagtatatgagagtcttactcttccatcagctcatgagggtttggggtggatgccaggacaagtttaccatctatctacccagggccataggtctcgtgtgtgtgtgtgtgtgtgtgtatgtgtgtgtgttcatgcctatactcacacacatgggagcatgaccacccctctgtgcccctttctatcagtggacagtattgttgtctcccctttggctttcctggcccctcccctggttgtcctggcccctcccctggttgtcctggtccctcccctggttgccatgggtgccgtggggactcggatgtgtcccctcatatgatccatgtgatgtgcccttcataagcgctcataaacatctgcccctgcctgctctgtccaggggtattttagtgacgcctggaacacgtttgactccctcatcgtaatcggcagcattatagacgtggccctcagcgaagccgacgtaagtatgcacctgtgtggcctgcgtcctctctctcctctctgcacattctgctccctgccctgatgtggcatcacctggacaagtcacagatcccagtcacacatgattggaaactagacatttcctcacagaggttgtggaaaacaaccttctagagtagagccttagcctaaaggcctctgcagacataaatcacctttgcagggctgactctggcaccattgaccccaggcactagtaggcaaggtaagatagggtgtctctggttgtctccatttgctctgtcaaaatccatccaaagtgacgttatctctgacatgtttgtctcggggcagtttttcaagtagtcgagtggcacattgttaacgctgtccttttcttctttttttttcctgttgtgcttcctgtcttctgtggcttctgaatgcttgcctaacagcactatttcactgatgcatggaacacttttgatgccttaattgttgttggtagcgtcgttgatattgctataactgaagtgaatgtaagtagccaaccttgtgtcccttaacgtgattgctttcgttccgtctgacgtagaagagactagcaggcccacccgtgaatccccatgcacacagaattatagacactaattcactgtggaagatgaaagtcagttaattagtggtctcttctcccttgccctttctttatcccttccccttaaggaatgaagacataagtatgaagttgccactttggaactaaaatagttatttttaagatgtcatactccatcttttaacaatgtggccttgtacccacagggttctgggatggcacaggagatccctatagctgtgcctgactttgagatcattactgtcattgtcctccagctcaatctagctggtgactctggccctccatccccaaagagtgttgctggtgtgttccaggagagagttataccctcttgtcgcgttcagtttatcattaacaagggagcacatccataataggtgaggcaggctccaccacgagcagtctgacaactcaaacatcagagtttgagaagggaagtactggcttgctcaagtgaaggcccaaggcaggcaggaaagggccctgtccattggcctgtacttcgttcattcgcaggctttagtggatgtcagtgtgtgtactcctcaaggtggtggggggaagtgccgctgtgtgatgttggcttctgttctgtgttgccagtccagggctgcccctgccacaccagcgctctgctttgcctggctgacatatgcagggctgagaattgtcaggttcatcctggtgcccagactccctatagggaatgggaatgttggtgctccttgatgcccctctgataagccaaggctgactttcgtcagtatggatgattggacagccattagcctggaagttccagccccacttcagccttgacttatggaacccaggcttcatatgtccatcagagtgacaatatcttctgggaataaaatgatgtagatatttgtgaaaatacctactaaaacaaagggttatgaatacacactattatttatgcaaatttcctgtttactatgcaaaatggactgtaagatattaccatgggcactgatgtatgtgccaagatagtaaggtgacattttgctaggtctgggtacacataccccccaacctcctaaagcccagactgtaaactcaactttatgagacatattctataggcagctgtaaaattgtcactcatggcaagtgaatagctttggttgtaaaatgatctgttcttacttcaagaaccctaccttggctgctgtgtggcaagatatctgactgctttaattgtcttaaagcatttgaagtatctgtaatgtgtgtcagggaacctctcaatggtcagaaacaacttataacagacgttaaaaataccataagctagggtactaatagattgttttaagtgctatgagccgggggtcataaactattttctgggtaccaggatgttaccaagacttgtctaccagctagacccagctttctcgtgctgcccacttgctggctagctagtgtgacttggtacactcagaggcaacaccttcttcatgggctggaagctggccctgctcttcaactctggcctggccttgcctgtcagtgtctccgggtggttgtgcttctgtgtggattgggaaggtctatgtgtgcatgtctagttagcagtttacgtcaggtgtctgtgcagggcctcattcatgatagccaagttctcactgaagacacacactggggaatcttcccagttcccaagactcctgtcaatcactaacctttccctgactagttgtactctgagaccaaacactccttaaccttggcttggtaactccctagcctgtgttacctgcaaagatctcagtgttggcccaccgtctcttgatgcaaaagttatgctccctgcacatttatcccatcttcaacatcattgttactgggaatccaccacttgtaggcctggagctaggctctggaaataaccaaaggttaagagacagacagacagacagacagacagaccattcttaacctctgatattataaatatgtaagaatggggatgtttatccccatatcctccctccatacgtacctagttccccaggagagggatgcatgtcatatcctcaatggccttgtctcctgatgtccagagtcaactgagcatgaatatccttggtccttggtccgttgttggctggtttgagttgctatcataatatcatcatcatcatcaccaccaccaccatcatcatcatctcatcatcatgttttgtgatgtttaacctgccacactctctcccctagactgtcgaccttccttttccattgcctaattgatttttcatgttggttttatttttagaaaattgtagcggcaagtatatataatcatatatacggtgaagtctttaagcaaaagcgcttctagagactgtatactttgtttctgcttcccacttttggtgtttcactgagttctcacaggacttgctaaggatcaaccatggtcaccttgactgtttcttctcccatatgtcctggtccctggctggggcctcagctccggcttgtttggtcagtcatattggttctgtgactcaccaacacagccttccagattgagtggtttggtctgtaaaatgggaactctacttgtttgcattttttgtaataaaaaaaaagggggtggtggggggtggccctttggccctttgcattgtcctgttcgcatgctcacccagatctttgcatcttgatgtcttcccatgctccccaccctatctgttcgtggtgtgatagctttctggacctgtccccttcacctttgtttgtaatgccaccaagttgctgactgttgaatgacacctgatagggctgactttgctttctctttgatgcctgtttgttccttgagttctgaaatgatcaagcaactaatgttctgacccaggcagggatggttgctgctgacactccgtctcttgccatcccttgttgcctaggggaggagtagtcttgcttcgcgtttatcaaagaacacataaaaaccaacaggaactcactcccagatcctaggcattgatgctgccctgtcacgcgcccagcttagaccgaggcgtcaccatgccattcagtttgtagtcagaatgagctctcaagtccatatggtggccaggaacggggctgaggaatgtgatcttgcaatagcaaaacctactgaagctatccaccccaaccctctagatgcccatggaattctattgaacatggatcacccagttcctcgaggctattctcgaaatgacagtcaggtagagagccagtctttgccctgtcccatgtcctcaagggtcacctgtgggtggcctcagaagctgagcagggtcatgtgacttgcacaccttgcccatgctctgctctgtctgtccccagtgcccctctggccctcagaaaggggacagatgtagagtttaatccctggaagccaatttctgtttcttcatcaactctagaagcccctgtaacagctgtgacagcccaagtggtctcttttactggtttcactctctgtgaccactctgcaggtgtgagctatttgcagaatacttgacctgacattgatgtggtctagacaggaattctccattctgggagcacattagaataacttactggctttcaaagttcctgaagtgtaaaaggacccagattcatttagaaaatcccttttgggtggcccctgggcagtgggtagctttagagaataccctagggtcagaacaactggtctctgtgcagatggagcaaagccatcctagggtgcttcaagtgtggaagatactttggcaacttgcatggttcccccactgctgccagatacattctcccctctagcaggcctctgccctgggaggtgtggtggcgggggcagtgtctcaggccactctgggggtgcatcctgcagtgctttggttttcattccttgtgttgtgtggtccactgcttttgtttcctgaaaaatgctatctcctctcctcctccttaaaaaaaaaaaagacaatttgactaggtgttgtggtcgatacctataatcccagtaagtaggaggtagaggtagctacataatgaatttgaggccagcctgggctacataagaccttgtctcaaaaaaaaagtttagatttaatgattgatgattgtcattcttcagataatagtttaaaaattgcacatttcaaaagtcagtttagctaactttcatcagcacaaaggaagaggatcacaaatggcctgtcatggagcagcacagaggatggagccgaagagagtggccagaaagagcaggcgtactagtgctcttacaggtcccacatatgttgcaggtattttggtaccatagctgtagagggctctgctcttccttctccagtcctcttagcacagacaagcagaggtgtccacacatgcacctacccagtcagaggtgtccacacatgcacctacccagtcagaggtgaccacacatgcacctatccagtcagaggtgtccacacatgcacctacccagtcagaggtgtccacacatgcacctacacagtcagaggtgtccacacatgcacctacccagtcagaggtgtccacacatgcacctacccagtcagaggtgttcacacatgcacctacacggtcagaggtgtccacacatgcacctacccagtcagaggtgtccacacatgcacctacccggtcagaggtgtccacacatacacctacccagtcagaggtgtccacacatgcacctacacagtcagaggtgtccacacatgcacctacccagtcagaggtgtccacacatacacctacacagtcactcacatgtgcacagtctgctgtctgagcaatagtgctgcctcctttaccacagcccttaggaagagtgatgtgggggacaagcatcctgggaaagtaacccccatggatagtaaagccttaagttaaaaaacaataacaacacccgccccatgatcagagctaaggatagcagctcacacctgtaaccccagaacttagggagtcagagtttgaggccaacccaagctgcataatgagaccttgctctctgtctaattaaaacaaacaaaacaaaacccatccctttaaggaagagctacttctggggtgaggcaataaaagaatttgacaaaaataagcctgggttctgacatgtctatggcatgttttgaatatatatatctcctgtacatgttcctgttctgcgcatccaggtagactagagccctttccagtggtcagcacctgctcttgggtaccttcgctgctgaattacaagtatgccctgatgtatccagagccattttcttcttactgaagttcctagcaattcttgtttggtctcaggaatcagcttaagagccaagcctttcttctcccatgtccccagggaaggaagctcctagcagcgtacctacctttgcccctgtctagttatgctgtgggccacagaaagcctttgttgggaatcaccaacagaggaacctgtcctttgtcagtctcaggaagactcactgcctcagtggaaaaggcacttggtggcaggggagataggagggcctttccccattcttgctattatcttttcaagatgcctcctggcagggaaaacttgcctctagcatctttgtatttatttaagcaactccccaaaaggactatgctgagcattgagtagagtgaagaaggagaaacaacctccgtggagataggagaaacaaccattcattgacatacacactcagacctgggtgaggcaaaactgctggggctcaggcaagctgggccatgctgttcttccagagtcctggggactagagtgtgggctggctgaggctgaattgcaggctgctgcagagaagcctgcctccatctcttgcactaaccaggcctctagtccttcagcagagacatgtatcctctggagcacatataatgctaagtgtggggaccacaggcagagccactgttttcctcatggttagagttggtccattgttccaagccaggaggcctgctgtaaggtggtcggctactttgaccaagccagagaagcaaggtttctctgaacctgtgtctttaaagacctcaaagacaagaaccataatctttgagcaggcatcagtctccagagacatcacatccctggaaagaaactagactagaactagtgtgtctgtgagtctgtcagtgggtgttgtccactccagtctagttccagagtgaagcactggtattgtctcagggagggagcagctgtgttgaccaaccactacacactggtaaaggggggggagtatctcctagccattgccgccttcccccaacattaatacatctcaatctttgatttcttaaagccatctgaaagtgagactatccctctcccaactgccacacctggggtaagatcagtgactggtcccaggggctgggccctctccctgactttatttgaccatgtcgagttttccactggtgttctgtactctccatggttgtcccttccagaacagtgtctgcagtgatttgcattcatcatccgtgtccagtactcttgagcagcccagcgttctcctctaacacagtagaacacagggacatgcatgtgctgtgtggatgcagtttgtcccctgagcccctgtgttgttagcatgtgatttttttttctttcatgccatgctttctgaggtgtaaggccccagaaacacgtcttcagttctcacctctgtcacctttgcgtccgtcgctgtctttctgaaagtgtcccatgttctgctttccactgggtttgacctctccatgataacccttcagaactctgaagagagcaatagaatctccatcacctttttccgtcttttccgagtgatgcggttggtgaaacttctcagcaggggggaaggcatccggacactgctgtggaccttcatcaagtcctttcaggtaagagcaacctagggctttgctttctgtcctctggcccagaagaccccagctctctctgtctgaccactgagtcagcagagattatgggaaactaaacaagaggcagaaataagaccctgaaagtcagagatctgcaatggtttccatatggaagaaatataaatctcaaggacttttgactgcccagaatgtctagcaacagtagtgtccgagagagggaaggtcactacacactccctgaggcttagtagcctgttttagttactgttatattgctgtgatctaggtaacttataaaataaaccatttaattggggcttattttccgtttccataatcagcatgacaggaaacatggaagtaggcaggcaggcaggcaggcaggcaggcacgggtgccagagaagtaacttaaagcttacttcttagctgcaagtttataggcaaagagagacagacatataaacacatagacatatagactaagcctgacctagacttttgaaacctcacagcccaaccccagggacacaccttctccatcaaggccacaccccctagtccttcccaaacagttccactaacggggagccaagcattcaaactgtgagtctatctgggccattcttattcaaatcagcacatagtttctctcttagatagattctcaacttacaccagattactgagtgcttggtagaattaagagttcagttcatctaggtatctaccaggcctatgatttcttagattgcttctagtccatttgagagcagagccccttcttcttcaccacctggcgcctgctgcagattttccgctcgtctagactgaaactgtgagggtgaggaataaatacagatgtgtaatcaaaggcacaactatgtagggaattcatagccatgacccttcacttcttcatcagctgggtttcattcatgattcaaatgttatgtgaacaaatgaaattatataaagaaaaaaaatcaagttttccctaaccccctctgggataaccagtagaaaatttcagtaattttttttttttaagtagggaaaagggaaagagatggcattgagagaaaggagaagacagaaaaaagatcacaggaaggaaatcacagccctgttaaggatggagactgaggaagaagggtgtggcttaggagagacagggcaagcgccataggcaagagaaccagggtgtggccaagccctacagccctttgtggttagtccacattccagagatgaactgctaggataatgggatatattcatgcaaaacaatcttggttcttgatgaaattattaaacttaagaaaaaaacctcataagtaaagaagccatgtgacagaatagtgatttgttctgagacagtcggccagcacattcctcaaacatttggatgtctatgaagaaagtgcagagagtttttgtggggagaatagccctgtgggaccccagtaagcattccgtctgtgggcatagtgctgtaacatgggccaggctgtgtgtcacagagtcccaaacctctaagtatcctgtcagcattctgatgcattgtcttagactggtgagaaagctgattccaatcagctgtgcttggaattaagcccaagaagagcccaggcagccctgtgctaccatgtacatagatgcatttgtcatatgtgatgatggagaaaagccatcaaggaaagaactcagatctggccagacacatctactttacacaaaacatacactttacacatgtactctgctagcttaatttcttcctgggtccagcctgtgagtttgtagctgttttcagatgggtacatggttcagctaagagcattaaagagagtctcagacacaccaaagtgcacccgaggtgtatcaaggaaaggaagcccagcagttagctcccttggatgagtctgaccgagagtaaccttcaagtttgcagtctccatgtttttccctgtcttcagtctgtctgtagtttgtaattgctgccttgtctgttgtaaatatctgatctgtcctcatgtcttgtcatccctaaggctgactcatgttctactgcccctaagaaagggggctttgctctatgtttactgagcagcgtagagagcatcacatgcaataggaatgaggcatcactttgcaaacattttcaagaattttataagagactgagtcatttactctagaccccaaagcatccagtgctacaaacacaccgtcactgttaccaagttttatctggatgctgatttcaccatttaaggcagatatttgttgtataagattgttttcagcatttactactataatcacacacacacacacacacacacacacacacacacacgagttgctttttaggttaggggcataaaagtgtcagttataacttattatagttatgcattatcttaggctgtaaagatgattacataggtaatccaaggcaagtaaggttggttggtacattgttatcttagggataagttaaacaaacaggctgagtgcacagcgggattaagagccaaatgacctcaaggtgtacaaatactgaggcccagcagaacctgcaggctctttgaacgtaagagacattttcataaaaatgtatcgctaatggtgcattttgaagtgtttttgcattcttaagtggtttttggccctctggctccttcattcttcttaaagtcgcatcgtaaggaaaaccagaatgtaggttattttgcataaggatgtttcccagatacagcgcagatggaagcaatcggggaatctggtattttagaatgacttggtcaagtgcagtttcctgaaggctagagagtgcatttaagactcactggatatgtgtgtctgtatggaagaatgtttagggttagcacagggtagcacaactcacttggcgagcaccccctgcctgcctacactttgtgatgctgggtatgcaggtggtgctagtctgggcctcatgagttgttgatccagcacccaccagcccgatcctttctgtcccacaggcgctgccgtatgttgccctcctcattgccatgctcttcttcatctacgctgtcataggcatgcaggtgagtagcagttgctttccctcacaggaccctttcaagctggccccgggtctgtacgtaggccaagtaaagtagaaagactaggtcacgattttccagaacgtgccccagataggagatgccccagtcgtcagtgtggagatcacgtgctctatgctgaggatactcagaaggtctacaagcctgtagatctcgtatcacatcgggattccctggtgtttccagatgtctcgggtagtactgcgtctggggcagcatacttttccagagaagcgtggactcgggctcttaggctgagggactacagcaagcgtttctgggttggaaacggtctggggccccattgacagctgggtcctaacgccatagggcagctgggtggcattgaaagctctgggtccagggagtcagaggggaatgtcctacactggtagagtggcattctgactagagagaggtgcaagtgagagaggcggggtaattccagcccagacagattgatgattgattgattgattgattgtcctgaaggcttagaagtacttgtaggaattctcttgggaattataggacaagaggcataagtcctcatgaggtagcccagggtagcctggggcactgcaaaccgcactgcacacccagctccagatcctcctatcgtgatttgcgaagaccatctgaaatagcgatctgctcataatgccactgggaaatctttgctgggcgtgaagcccaggaggccccgccccttcccctttgtctccagctatggttcatctctctgcttaccacccctcccctcctcagccttctgtgctccttcaggtgatgcccctctgcctggagaactgtcgctctgactgactgctgcttctccctcaggtcagggtttaggtgtcgctccctctggagctgttcctgctgttgacctaacactggctgaatgcgcctgttccctgatcgcctcagtgctcgctgtatctggttaccattgcttgaacactccgtagtctcctcagggcagtgactccttcggggtgagactgtacctctgagacactacattcctaatgttcagcctggtgcctggcgcatgctgtgcccagcagatctctgcagagcacaggaggtgcccggtgtcctaagaaagccctagttgctaattaaacccaagtcagttctaagtttacaaaagtctttttatgtgactgtattagtcggcatttcatgagtacactgaaatactgcagacagaggtagtctaatccacaagcccatcgttttgccctatgtcaaggcagggcaccatcatagaaatgcatcatgagacagacctactcaggcaggttggcagctccccacgttcccctgtgaagacaaaaccccagcagcctcagggtctgccactagaccacaacgttctacctctcaagagttctgcccgcagagatcaagtctctaaccacatgaaccttggagaccattcgagatccaaactgtaacagtgacaaacgtttgattcccttcccccctaataacttcttctagatgtttgggaaagttgccatgagagataacaaccagatcaataggaacaacaacttccagacctttcctcaggcagtgctcctactcttcaggtgactgggtccttgggggtggggggtggggtaggagtggggtggggtacccctaaagttctgaacagatggggtcatgcttgctcttgatcccattatttcttgatagacttctgatttgttgttcttgtttgatatttcttactttggtttgaaacaggatctcattctgtagcccaggctagcctggaacttactctgaagtccaggctagcctcaaatcataacagtcttcctgcctcagcctctcaaaatgctgggattgtatgttctactactctcagctgttttataccttttaaaaaaacattttttcatatgtatgtatgaatgtgatatatgttcgaggtggacatgccactgtgcgcatgttgagatcagaagacaagtttatggagtcagtcttccttcatttttacataggttctagggattgaacccaggtcaccaggcttgcacagcaaacacctttcaccccctgacccgtctcactggccataattttgtactaaacagaactagcatttcagttagagaggaactgactgcattgttaaaactgctggggtcattcagattgtgactgacagaccaccaaaagcaaattgtaggatagatatgtatgtgtaagtatgcatgaaggatgcaccagatcacaaccagggaaacagaaacacagtggaaacctaggaatttgtaattcccaaaattaacctgtaagccccacatgcccaggaatcaggtgacttcctggaatgctgggaattgtagttcttgggaaataacaccgccacatgggaaagtactgtggcctataagtttgcccttataaccccctgcaacactggctctaggccattccagctgggacattctagccaatggccttgaccaaagtcaatctcttggtcagtatttatttttttccctgtaggtgtttttaaaagaattacttatttattttatttatatgaatatactatagctgtcttcagatacaccagaagaaggcatcagatcccattacagatggttgtgagccaccacgtggttgctgggaattgaactcaaaacctctggaagagcagtcagtgctcttaaccgctgagccatctctccagcccagaatttaatatttaaatgtaatatttaataaaggcttgctttaaaaattggtccaaaatggtacagttgttttttttctggtgaatcacaggattaacatattggaccattactgcctcacattttttaggattggttttaatcccagctaatttaactttgcaaagaatcttcctcacagtgagagaactttctagaaacaaggaagcaatgtctaatgaccccagtaactgtaacaactcatttatttataacttaggtggttttcaactctttcaacagaatcagtcaggacttattaaataactaatagcaatgtttgatgaagagacaagaaaaaaaatgaacatccattaatataaagaattgaatcagacatcgttattataaatcgtatcataccagggcctctaagtaactaaattgtatctaaaagtcaggcttccaggctgtcactaatccaaacggcattgctacagttacatacattttgcacaagctaagaattttcttcccaaatgtctaatccatcagttccttgccctttccctcaataaaagccctgtctcttaacttaaacaggtgtgcaacaggggaagcctggcaggagatcatgcttgcctgcctcccaggaaagctgtgcgacccagactccgattacaacccaggagaggagtacacttgtgggagcaactttgccattgtctacttcatcagcttttacatgctctgtgcattcctggtaagcagtcttggtaaagccccttctccacttacaggactgcggtagcatttgaggttcagaccagtaatgctgccctgtcgtagtgctttgaggcagttggcatactctgggcccttctaggcaggtgtcttgcttagtctggcatgtgttgctgccttatgggatgggatgggttggccgctcactggtgggctggggtcatttccagccaaccttgttactgaaggctgctgtttcctttcaaagatatcaaagccactgtacgtggctttaagggcctccaaagtgtgagctgtctcttgtcacaattaaattataagattacagtgtgcttcagggtgcgagctaatgcaccctcccgccccctcatgagtctgtgccaagccatctggtcagagtcctgccctttccttgactactttctggcgagagaatattatggcctgcctctgcaacctggatatgtgggttccaatattccatgccctgcagttaggaggcagataacagtgcaagggacccacccaccaccctcctgattcactcttccagatcatcaacctctttgtggctgtcatcatggacaattttgactatctgactcgggactggtctattctggggcctcaccacttggacgaattcaaaagaatatggtcagaatatgaccctgaagcaaagtaggttgacgaacacccctctggctttcaggggtcctttgggaatggctgtggtgatctctgcaggggtcggggtggtaaactgagctcatttggggacctcaggctgtactttgcttccaggggaaggataaaacaccttgatgtggtcactctgctccggcggatccagcctcccctggggtttggaaaattatgcccacaccgagtagcatgtaaggtgagtgttctgccatccaagtctgacaatctattcgctgctttgttcagtacacacataacactaatctacattcgccaggcctttcttaaggtgttagacatgtggagataatgtctctgccttgacagcaccctcaaatttgcaatacttagaattctgtcagggataataatgggatgaagggaatcctacaaactgtcaccgcgtcagatgtcagaggcgatgatgtttaggccaggctcaggtgactatgaatgtcaaacagcatgtgtcaggtctttgggttgatccctagcgccactaaacccacatgaaaaacagaggagacgtaggagtcagtcagaggcaggcaggcaggtgggcttctcagacaggagaacagagtccagatagaagccagaagaggaagagcctcagactagccaacagcaaggcattgggtaatcatctgactggaacacaagaccaagtggcagaggcctctgtccccaagctgaacctgaatattctgttccacaacatattctgtggaggacgatgagattccaggtcaccaactcagagttggtggtgttgacatgaagcggactggaggaaggaactacatgggactgccaggatgagggccgcggggatggggagagaggagtgggtagcatggagatgagctgaggcagtacaaggggcacagtgctgccaggtgaggagatgggggtgagaaaaggactaatttagcccttggctcgatggtggtagacctagggccttagcttggtggtggtagaccttgggccctagcttggcagtggaaggtattgggtcctagcttcccagttatagacagggtgacagattgcatgtggcctctttgctgtagaattctgtagttcctttccctggggcatgaagctgaggtgtctctgggatgagcttaggtctcctaccctgtttctctcatccccacactggtcacgtggagccttagttcacactggtccttctcccatagagccacagggaccttctcacattattgtagcgacaggaatgcaagttttgtctgttgaacttctccttgaagaaatccattcccagcacagaatggaatgaattaatgcacagaacccagctgaccgcagtcatatttgtctggactccaggaccctttacctaaaggatttaagtgggacacaaagtcagccattttgctgacttaggtatttgtcaggaagagtgaatgaatgcccatcatcctggctgcactggctgtggagacaggaaaggttgatagtggcatttggaacttaggtaggttgcctagacaactgaatcctcgtccctcggcagcggcagcgtagaaaaaacatccaacctttcttttggaatgaactttttagccaatattaactttggattttattttgttttattttttgagactggctgacctggaagtcgctatatagcctccccaagctaacctccactcaagagatcagcctgtctctgcctcccaggtgctaggattaaaggagtgtgccaccatgcccagctagaatttgtttttaattaccattgttaaatgaacttcccatgtgtttatgatctacttcagtcctcacaaggcctattagcctgccttgctgactggaacccaaagaaggtgtctcttaccccaagttcttctgcaactctccttgatgctggtgttagaggtacttggagaggggtgagacgtgggaagtattgatctattctgaaagtccaagccttcagagaagccatggagacctccccaagatagcacatgatgatctgtctctggaaactttctgaaagaacagtagtgagttctactgggtgacaggctcaggccctgtgcctggcctatgtatctgctgtatcatttaattatcataaaatccttaaggatgtacctagagggtaggcctgtccccaggacacagagaactaactactgaaacatgaagaacacatgggcaataaaatttaattatttaacattaactagcatctgattgtcaacatttatatgtcacaactgaactttaaactttgttatctcaggttcctcacagatgttaggttgtatctgtcagtattttccagagaaataggactgatggggtggctgtgggcttatgtgggttatgtgtgaccaatgtctagctggccatgtatagatgtacatacatacatacatacacacacacaggcacatacaagggccggtttattatgtggtatgggcacatgtgatttttcaagttccacgatctgtcatctcctagtgggagactcgggatatctgtggtaccgttcagtctgaggcctgaggcctgaggcctgagaaccggggggactgacgagatacatttcagacagcagtagactgatggtctatcttaaactgataggcagaaaggaaaggcaatgttttcccacttctttttgtgctggagttaaatgaagactgccaacttttacaggcatttgtgtgacttagcccaccaattcaaatgctagtctctcccagaacaccttcacagatggacctagacatgatgtttaagccagtatctgagcagcccatagacaagtcatgttgatccctataattcgccgtcttagagaggctcccagatggtttttgagttgaagtgaggaacatgaatggggataaacaaagaatggacatcaaaaggggacatggctatctgtattctcacgaggaactcttttttatctacagagattggttgccatgaacatgcctctcaacagtgatgggacagtcatgttcaatgcaaccctgtttgctttggtccggacagctctcaagatcaagactgaaggtacgcactccctggaagcaggaagcgaggcaggcagcaggagagggagatgttacatgcgcacgcgcacacacacacaccccacccccaccccccacaccccacacacacagagggttcattgtaggaggcaggggacgcagattctgcaaaggctggagagtgagcctgaggtgaggaagcagaggccttgcagagaggcaagaagggaggagagagatgaggagacattgccagtggggagacaggtgttcttcacaacgctgaagctctacccagcagagctagccccttcccacctagcgcatgcttcttatgctgcaaacaagcatcattaagtgttccagaaggtaggagggcctactaggtgatgtgtccctagaaaagaacctgtcaaatagagagaagtcaagattatgagggcagagtaagtacctacatagggcccgagatgtgtcttatggtgaagttttcttgtgcaggaacaaaggcaggaggagatggagggagagaaaggagaggagaaaaaagaggagagtgaatggaggaagaagaggtagaggcagaggaggaggaagaaagggagaggaggaagtagggaagaagggaaggaggaggaggagggggaggagggagaggaagcagcagaggcgggcagttgccttctggtgctgggagccaagggaggagtgtaggtcgtagctggggtaggttgctatggcagcagaaggtagttgatgaattctcaggtggaaatgatcacccccccagaggtggcttggtaaatgcttctgaatataggaaatgtatttagcgatcactctggatcacttctatcagaaggcaatacaaggacccggcaacataacgagggcaggagagcactcggccacaaacacaaagcctggtctatgcagtggccacacacccctctttttaccttttggatttagggaacctggagcaagctaatgaagaactccgagctgtgatcaagaaaatctggaagaagacaagcatgaagctgcttgaccaagttgtccctccagctggtggtcagtggaacctatttcccaagtagttcttgatcaagaaattagtttcagtggcaagacctccagacagcccagagagggagtgcagggtgctatcccagaccattagagtgtgaggcccacagctaaaggagccctttggcttcacccgaaaatatctggggtgatacgaagacagtcaaaccaaagaggggcttcagtgggggagaagtccagagcccgtgaggctagagcagggtttttgctgtcatagaaaatcagtggtaaaggacatgacagcactcacagagtgaaaagcttgaactctcgccctaaaggaaatacttaaaactagtctccggtcttaatcatctcaagaaacgtggggagttttcagaaaagaatacttctaagggaattttaagaagacggcatttcccactgtagttaccaagggtgtcctttaatgagatttagagatagaactaacaagcatgcttcttttgttatttatcacaaattaactgactaaacatttagaacttgcatatatataatatctctctatattatatatatatatatatactgtttctctatttttgtttaaatacttgtggacattgaagtgagatggttattttccaactgttttgtttcaagttttaaaagtgcagaatctccttacccagcgtcccgtctccctgcagtctagctaaccctagcctggaaacacgataaacatctggcatgttttataaccaggcatggatcagaaccagaagctgaacccagcacccagactgtgcgagcctgtggctcctgagggacagagagagccatgcgttagccactcttgcttcttaggaggcttggccttcatcatgattcaggccacccatagctggcctagccactagctcaactctgagaaagtggctcagaaggaaatgaccaacatggtgggaattcccacctccagacccctagccccaagcccagattctgcacttttaaaactcctctcggtttccgctcttttcctttcagctgcacatccaagtggtcgcatggcttagatgaaccgcttgttaaaatgttgtaaccctgtgcctgagcttcctctgcagcttccactcctctcaactctcagaatattctgaagcaattctgttttagggtggtggcatggaatcagagttatctcttgccaactggattcccctacattgtttgttgaactctggatgcatgcgtcaggatagcaggctgtgcctgtctgtgtaaaccctccactcacgagcctgcaacactcccctctctcttgttccaactcgctctctttggaaacaccaccttcatagtggtccatctgatgcccacaggaatagctctcctcacacgaggaggtatgcttgaagtgtcacctgagtcacggggacggtgctccatttcttttcatcttactaaggaaaagaaaagttcagactttggcttataatctagctaaactcttcttttgaaaaactgaccaacatttatctccattggacttttcatggaggatgaacacacacacacacacacacacaccacaccacacacccacacatatacacatacacacacacgcgttctggggcttggtggttctctctgtctctttacatggtttggggtttgggatgataggagttaatctggtcccccatgtgatattagagaagaaagaactagagtcttataaagacatagaatgctccataaatttctatagtgcccactgtagtgcctgcttatttactttacatatcacataagcacattgccaccaaaggggaccacacagcacctttaggccttggtggatagctctggttttagtttctatattcgtcatttgtctctttctctttctctctctctctctctctctctctctctctctctctctctctctctctctctctcctttcccctcccctcctcctttccctcccctttctctctctttctcatctcccattggaccagtgattcccagtctttctctcatagtggcacacttaagaaatgacaccatgacatataccttgggacagatgggtggttcgaagtgttagtgtctcccatagtataatgtggttagagaccagcatgatgcgctgcctatgtccctgaggagctcaggagaccacataactgaaggagggaacagagccagatgcttgtctgggcagatttgccactgggatgtgatctgagctgctcatcgtgagcttggtggaaacaatgccaagaaccagccaatgaggacatgctgggattttctttttctctcctgtctgcctgcagtctgacccctgctttttatggggctgagatgtctcagcctggaatcttgcctgggttctcagtgctcccttgtcatatcttccaggtcatggactccccctttctctttagaagctcctttccctcggagaacctctttcttttggaaattccttcttgagtcataactctggttccttggtcccctgggtgtcctcctgtccaagatggcctcaccacatccattgcttctctctgtccctttcctgtcaatgatcaagctttagcttttcttgttcttaggagctcttgttcaggccaggtctcttggtcctcctgctttatctcagtggagataaccatgtctccttctagtcctgccctatggatctaaagtagaagagaaaggacagcaagtgcatcttttactagaaacatcttggtttaaagcaatatgagcctctatgttgaatcaggagtttcccagggctcaggggaccctggagtacaaaaggtatcagtatcgttgaagtggtatagattctagactcttagatacattggcccagcagccactggcctacttggaaggagctagaaagggcagggctacgtttataccaccagaatggcagctcagaggaaagcagggggttgggtgtggccaaagccactctctgaagagagaggtaaagttgggggagagaagggccctgggctcaggccttggccagttgacctgggccagtcatgtaacttctccctctctcagaagagtgagcagagttgttatgtagaagttatgagacccacgaggagttatccagccatggtgcctagccatggctgatggacagagtggtcagaagctggagagagggcaagcatgggctttgcagagcaaatatcttggcttgtttccctatggatggtgccatactggatggtggagaagaaccagtagccagtcagggagatatgagttcagatcaacacagagccccgggtttcttcacttgctcctccatcacaccagggcttccttggctcaggctcaggaggaatataacatttctcaaggccagttcaccccaaaacagactgcacaagaattctcagcagcttctggcaggaatggctggagaatcttcttccccaagtgacccagaagccgctgggtgggaaccataaatcagccatacctcccaagtgagcactaagtaaaacccaccaacattgtattcatggatacagtgggtcccagtgatcccaggcctcctatgctccagcatccattcagtgagtgatagtcttgtcttggtctgaagtcatgactcttgtcatcagagggcacgtgacacaaggacagcccacgcctgggttggagtgctttattccccttctcttaaacatccttagttcttctgacatgggacaccattttataagggagaatacaagctcacctaagatcctcttgtccccagtccacgggactcttgcaaggatagcttgaccagaagcctgaggacctacaactgatcctcagcctctgcagnnnnnnnnnnnnnnnnnnnntccctgatctgtgtctctcaccagtggggtagctgcgcagctttaggtaaattcacataagagagggctttcactagccaaggtcagagttcctgaacctactcagggtggtttcaagtttatctcctccccttaggactctaatgagctatcagtgtgcctctagtaaggaacgggaaaccccatagtaagaagaaaggaatgaagaagtccctgaagacacgagcaatattatagaggcttctttgtaatcgagcatctccactcacttcgtccagagaaagcaacccctggcaccacacacagcgagcacaggaagctctagtccaagcctcccacacttgggcctgctgtctggatggtgcctgacacaggcaggctggggctgacccggggcggggcggggcaggggggacacagttcacactgacatgctcagagtggtttaccatgagacagtcagagcttctattctgcctcatgcatcaccttcaaagttgtcagcagagtcctgattccccggtgatacgtgttggaggttgtttctgaacagagcagaaagaaagcctgctcagtgctgaagttagttggagctgtcactgcaatgcagaaatccagccgttctgaattccaaaccacaaaatggtctcagagcttattggtggaagaacggggggagcgtgtgagagctggatctgcagtctctgttcctctccttctaagctcatcagtcacctttctaggtcgccatcttgtgacatagggatttggatgcataattgcacttgatgcttacagtaattacacatgcaaatttctatgcacggggtggaaaaacatgtggcctgcaaggcctttctgttttgtaatgtttattttaagtaaataaccaaggtggcgcttcctatcgttactaatatgctactctatttaactcgtgataaatatacattactttctgcaactctgaggatcagtttacttaactgactctagcttcgagccttaactgctttgcaaagctttgcttcttgctagactgagcaacccgtgttataggctgacagcccagtgccctttgtgcaccgtcccaccccacccctgcccccagccagaagtgagggtttaggctcttggtccaaatgtgctgattcgggagagctgtgtctggtctctccgtttagatgatgaggtaaccgtggggaagttctatgccactttcctgatacaggactactttaggaaattcaagaaacggaaagagcaaggactggtggggaagtaccctgcgaagaacaccacgattgccctacaggtgaattgccctcttgctctgttctcttctcactaacaatgttgccagctttgatttgaaacactagagagctgactattcatggttgagcagtgccacaaggattttgtttaaactgagatactgcccactgcccctcccactgtggactagccatttccgggtcgcaaggtaagtacttcctcctcttcgtgtcttctccgttgagcctcgcacctgccatcatctggtacgcgtgcaaaaccctcaggacagcctgcaatgggaaaggagtgaatgtcaccccacaccctagccacctgagccttctccaaaggcagcgtcctcgaggcaggccccctcccgtagccctgggctcagggtccagctgcccagggttaagctttccatcagaacgcaagtgctttgttttgtttctgtttgtttcttaccccacggcttgttggtttttggtccatttcaataacattcatcactccctagtatgtactgtgtgcacatgtgtgtggtgtgtctgtctctgtgtgctatctcctgatggcggtaaggcttgctgtgcaagtgctacacacataggccagcctttggcccatctccctgtctccaactcaggacccatatacatgctcagacaagaatgcatgtacaagagtgcctgtacacgtgcggacgcgcaaacacacacacacacacacacacacacacacacacacacacacacacacacacattcaactacccctgccaggccctgaaagtgtgagtgtggcatttagaaatatctggtctagtcaggggctaggcatccaaaggccatagaatcctagagatgcctagagctctgggtggaagcaggcatggagaggcaaggagacatgctagaacttgcaggcaggggagctggggaaggtggtttagggggtgatggtgtttaaagaggactggggacagatgtcaggagaagagaaaggggaagtacagaggttggcaagctgtcaccaagtcctacaaccatgctatctggagtgccttcagtctgccataaagacactttccttgtggtttaaaaagtttacctgaaaatgacttttatgtccctgtcctcatggttcttgaatgtggcctcgtaggtgtcaatgggggaccacgtggaatagtcctgtacttagttccaagagcaaatcaccagcattgttgtgtgtgcaaagggggccataactgtggacactaaggcctgactgtgatcttgctgtgagaaagactatgaataaggaggatggtgaatggggaatgctgggtgtgtctgcacatctcaggttagtagatggccttgtagacagtgaccagctgactcagagtgagatcccaggggctggaagcggggatattgtgctggtgggacaggtggacacctatgcctattcaagccagcctgtgttctttcattccctgatcacatgaccttttggtaatggcccagccatttggctcactgtgtcttttgcctcctgctgccctggtttgcaagaaataactctaactctaagattactccagttcacaagtagcctcggatgacaaaaactgaaaagtccagtttgcaaatttgaataggtccctggtttgtacattgcttggtagcagcacggctaggctggccactagcagagaattggtgtgcactgaaagttgtccccctcacatgaccttctgccccaaggagaggctggctggatctctgacttctctgggtaccctctacctacctgaaatggcttgctgctttagaagtccagttgacggaatcaaaacttggcttcctagaggggacttaatctcttttgctcctaaggtcacaatttgcagcagtcagtttgtctctgagctcagagacaatccaggtttcagtagagatgtgacatgtaaacacttggagctctgtgtgcatgggggagggctgtaccttttttgaagccccaaggctcactctggtggcagagctcagtgttttggtattctgaaatagcataaatgacacatggcttaagtagtcactgcattttgcagatgcagtttactgagccttgagctggtgctgacagaatgctataaaggttctgggtaagagacaaccacattatgctaaaataatgttgaggggtttctcctgtttaagtcttttcatcttgctatttaaagaaagagtcttacttcattggtagaagtcaaatatttctagttagacggtataaatacgttctcccagggttctattgagaattgaggccaggcctgtaatttatattaagtacacagcatagaaaattaagttgtgttcataatcttgacagttcagttctgaaaaggcatttgattctgaaacaaacattgaaaatagaaagtgtttgtctccttgatggataattctaattacatttttggcttcctctgatgcagaaatggctttaaatgtgatttgttactctccatttaattagtgcgtaaggaaacctccttttctgcattatgaaatatcatgggtggtgtagcagttaaggagctaggatcagtcgtgggaggaaggcactgacttgaggcagctagaaagaagacacatccttgagacagctgctgagggtggacttgtctggttgagaaggaagcaatgggcttctgatagcagggcccagtggggtggggcagggcggggtggggcggggctcccagcctggttgtagtgggacatggagtgtggcattattgtgtgagcaaaagtgaacagccaagcttgtgcgtgctggcctgcagagtgaggtctgtctgaagagctctcagaactggcaaccaagctgtgcacccccatttcatgccatggctcagcccgatctccccatgttcagaccaactgcagtgtgaaccttccctgtggtggatgatgactgaaggttctcctgcctctgcatggggaggagctgggcgcctgtgtcctggcctctctggtctgaatgagtgtgcactctccatccatccacccaccccatccatcccttcatccccatcattaaaactaaacttctctccagcccttctatggtgggagccagagagaagctgcatccggccttttggttatctctcagtcatccgacatacacannnnnnnnnnnnnnnnnnnnnnnnnnnnnnnnnnnnnnnnnnnnnnnnnnnnnnnnnnnnnnnnnnnnnnnnnnnnnnnnnnnnnnnnnnnnnnnnnnnnnnnnnnnnnnnnnnnnnnnnnnnnnnnnnnnnnnnnnnnnnnnnnnnnnnnnnnnnnnnnnnnnnnnnnnnnnnnnnnnnnnntcacaaccatctgtaatgagatctgactccctcttctggagtgtctgaagacagctacagtgtacttacatataatcaataaataaatctttaaaaaaaaaaaaaaaagaaccccatcctttgtgatctacaggatgtgatgagtaggttcaatggctttaatgcctgtgccttggccacaggtggggatggttgagagatgctggttacaagtagccattagcttgagtcttctgtttcttactgtggtcttctcagtacccaaagacagggaagcaggctcccagagatctgacccatggctagtcctgttaagtgtgtcaccatgtcaccttaatctggaaggcaatgggatttctcatttttagaagtaatggtccacccaaagccatagcactgctcttaaaatttatatatatgtacacacacacacacacacatacatacacacatacatacacacacatacacatacacacacacatacacacacacatacacacacacatacacatacacacacatacacacacacatacacacacacatacatacacacatacatacacacacacacatacacacacatacacacacatacacacacacatacacacacatacacacacacacacatacacacacatacatacacacatacacacacacacatatacacacacacacacacacacacacacacacaggttttcctttttactgtgagaggagaacagatgttaacagatgacatttcactggctgattcgtttgtttcagatgcttgaacggatgctttagagttctctgcctgagctaccgcaccaagctggttagtccgaaggcgcttgtggctaaggccttgaaagggcaaactcccactcgggcttatttctgctgacgcagcagcatttcaggagaaatgcaggcaccacagccctggggagaccccttccgagcaaggcactcctccggaaggaaggcagaagccgggctgtggctcatctgtggagccatggctgcctgtggcggacactgctcatggcggctccttttcatgaaagggaacctacgaattatggttttcccttccaagccagagactcagtgaaagggggtggggggtgggggagagagagagagagagagagagagagagagagagagagcacgtgagcgcgcaaaggggcagatgccccatgagaaatgaaatgaacacaacttgctgacaatggccagtaaaaaataataaataaataaataaataaaatgttttatatatatacatatatatgtgtatgtatatatatagatagatatacatgattaagcagacctgcgtaaggcaggcaactgactccgccccaaagtcctgcatccctagtttgcccgaactcccaaagactggcaggctggttggaactgagcagacagagttccttttctgtgacagcgcgtcacggcctcctgaccacccgccctgcttgctgcagtgacccagtccagaatgcactaataagtggaaggccaggaaactcagacacccattgaaactaacacacacacctgcatgccaaaaccaaccaggcaacagctcaggttccatcttaccgtgtcttcgggaaatgccaccacacccaaacctcatctaacattgttcgtctttagctcgcactcagagccagtctgggacgcctctttggaagcagtatggtctagtttcaaggacactgggagtcagggaacctgggttctagtcccagctccagcattcacttgctgcgtgaccttgggcaagacacttaacctctctgtgcctcagtttccccaactgtaaaatgggggtaataatgtcgacctacctcacagggctgttgtgaggatagctaagtgattgtagagctccttgaacgtatatttgcttattattaagactacaacaataataatatcatatgcctgtttactaccagaacttcaagaaattcttggtttggtttgatctcttttctgttctgtactgtagttatccattgagagttctctctatttttaagaccctaggcgatgcataaggatgcaaacaggtaacctgtcaggtcgcattttcaagtagcaacaatagtagatttttgaccaaaatgttggttgatgagggatttgctatcaaattctaaactccttcccagaggggggtcaagtctgtacctctgatattagtctgagatgcccaaaatagccaagaaaggagagccagtgttcaaagatcaatggttatggggggggggggactctaaaaaaagaagagaaggaaaaggaaaaggagaggaagaagaagggcttccaattcattgatctccttttgttggcttggagatcgtagcagggtgtgtatgcatgtgcatgactgtgtgagcgtgtgtgagtgtgtgtgtgtgtgtgcttgagtgtgcgtgtgtgcgtgtgtgtgtgtgttacattagtggatggaatgagttggtagggtagagaatgaggtgaggtgagttgaaagacaaggaagagagagccaggactctgtgtggtcctactctggcagaaagaagtgttcctccaagcatctctggggtgcagctaccctgaaggccaggctgaggtggtggggcaccccccccacccccagtgggcaggatgctcctttagacctctcccagggaagcctagaagggctttcttagtgacaccttgtagctatgacatttgccccgaccacagggcttccctgcctcgtggcttcactttcctacacaatggtggacctcctgggctcgctatggaaacaaacccagctttggctcatgcacaggtgacagtgagataaggagctcatatgggttttattcattctcacggcttgaagcccccatggttgatggtgtgggaatgggtgggaaccaagccttacatcatcctgggtggcctgtccccttggaagagagcaaagcccacccatgtctgatcttaatgctgtacccatagctgttgcctctagcatccaaatctctcagccagaagcctgcccttccgccccatttctccatgttttagcaatcactgggctaactcttatcccggcaggcctctgagattacctcagagatgatgggcagtacctgggtaagccactgtatcagaatcgacagagaactgatacatcaccctgagagggcgaatggttagccttacagacatggatttaaataaataaataaataaataaataaataaataaataaataaataaaaggactgtctcttagccaagaagcttccctgcccccaccttccctaccccggccttgatatcacttctgtttctagacctcgtgtagttctaatgggtagggctgtacaggcctttctccatgtatcacctaaacctatagacgttggaaaatgttaacttgcttacaagcctgatttaagggatccctacaatcccttgggcctggctgtgttgcagccaaggctactttagggaagacagccaagcatcagagaggacttcccccagctttcacacaccgggggaaatttcctcagagctctggcagaagaacaagcctgtggcagagaggaagatggaagaaactagttgggtttcacgtttaaaatcttcaacgatgggtacagcaaacccggtacccagcatctgaatctgcggtgctaaacttttagctcctgggtcaaatgtgacagagaccagcatccatctgtcacagggaagccacagtagggtgggaagtagattcttatcagaatcgaaggtcatggtatgacccaattcagaattagtccacgggatgaccggaccggctttctgaagaagggaggttggtctgtactgagaggagtcatttttatgtcccaaagtccttaatgaaaaagttagcgcaagtaatgtcatagccgcagactcttatggtcgcatgttctttactaatattcacccagtgtccctcaattgcctatcatagcacggctccattatctataggaaagggcttggtaagtaaagcttagggttcccaggtgagtggatacctgggtgaccttactctccttggttaggtcttaggcctgagaaagttgactctgggacagtaaggagaccattcatgatgcagtgttgaggtcaagaagccatgctagagcatgcccaccatactggaacttgagaggaagaggcaaaggctagctcagagaagccacatggtggacagaggtggagacatgtaggagggtcagaagagctgagcattaacaggagaccacagctgtgctgctgggtaggggacagattggttggcagttctcaaacatttcaatcctagggactttcctagtcttaaagtttatcaagagcccttatatatcaatatttactgtcttataactcaaagctgattaattttataaacacaagaatatgtaagcacaaagaggccagggggtggtgacaaccctgtcattcggccttggaaaccttgctgcacacttagagagtgagaatatacaaggccaaggacatccactcttacacgacccccagggacccctgaaggagtcccaggatgccttgaggtccatgaaccacatcttgaaacatcactctggggagatgacccaaagttcccccttaaaggcagaagatgttggagcctcatagtttccatctgtgcccaggaggctcccatgtagctggagcactccttggtgggctgcttctgctcctcctcagcctgtgcagcccacacaccttcctaattgaggccaagggtcaggtggtgtggacttcactgcctgtggtgacctggaagagcaatggttagagtcagtgagtgttagaaatgtgtttgaatctctaccacctctgcatagcacaggtgagaatcagggtgtgtgtgtaacgattaggaaccattcatcacgcctatgtttgggggtgatgtaatggtgagagtgagggtgtgtgcggtgctgccggagcattcgtcaagtccacgcagtggaggtgatataattgcttgcctacgttagaaggataaccttgaatgaatgtgtgcttgagacttggttaccaccctctccctgcagattgggaaaaacaaggcttctagctgaggttttaactagttctggaatataatgtaacctattacatatcgtcttggctcatccctcctcagtatgtaggctcaaaatgacaggaatatgattctgccaaaggagcctaaaattttggagtctgaattttatataatgctgtctgcatttttaggaactgttcaaaaacgtctctgattctgatgttaaaccaggaatcagagtggaataagatggaagggttggtagtgtggcccagtggtccgtgcttagcatgcctgaggccctggtttagtccccaccaaaataatgtggaactgcaagtggcctctctgttctttgcagtcataggttgcttagatagcgctattaaataacccctttagctttcagaatgtggtggcacatatgatttgtacagcccagcgctggccctcagtaactcatggtctgatgactcgtcaaggagaggagggctcgctgtacatgagtaatggagtgtcatagccatgattctaaccctttatatctaacacgagaactgttcacaatggataacaaaggccacaccatgacatttctcctggaggaaggcagtggtagaataaggggtgtgcccatgtgcagaggaggcgggggacggcacatagacaagcctgttcattctttcaggatttaatctcccatcttctaacagctagtctaaaactgttctttgtaattgagtgtgggccaagtcctgcccctcccccctaaaattaaccagaacttgtcaatagtgaggtgactgcatagagccagctttggttaaatgaggcgtgtctgggttgaggagcaggctgtgccacggtaacgttctttggcaggagtctgaagccctggcacccactccgtgaagatggagggtctctcccagggccgcctggagacttgcctctctgtcctccactgctacagcgtaggtctggggtgggtctctgggtgtttgtgtatgcatgctgtggagtgagagttggcagatggctggcctgacacagggagctagtctggggaagcaggcagcaaatgcttttcaaatgcatccagacagacagcaccccaccctgagggtgagccaggaagggaaatgggcatttctgctccacagcagagcgtcactttatgctgttgcttcagagatgttgagagagaatatatttttggtgacttaatcattaagtagagtaaatatctataaaattccaattaaatggtgtctaaaacttaaaggagcagtctacaggcaaaatgccaacatttctttttttaaacaaatatttatgataacagctagcattttaaagtcaaccagaaactaggcttaatcctgtttaatattttgtaagattggacatcttaaaacaagtcaataatgtttatattttatagcaattctgtgtttattcaaaactataactctactgtgatgttaatggaatgactttatatggctatgtgtggattaagtgctaatgaccacatttcaaattaaaacaatatttttgctgatagagatagatatataaaatatgaaagactagaaaattttactgactgtaatgttttcttcaagaaaaatactttttttttttagtgttgtaagtaatttctctgagggtttaagatagttgtctgtattctggaacactggattctgtgcctctgggggtttggaacagcctaagctaccttttagcttgatatgtgtgctagaataattttcattctcgtgttttgtgatatgtaataaattcagggtgctgtgcttatgctccatttcaattctagctgggaacctgtgtgtcggtcccctgcccccaggtcccacgcaagagagcgagtcagccccactcttaccaggtgcgctttgcgaactaggatcatgagttcaaaaccctctgctttcacatctgggaagagtgttgccttctctcctcctgtctctttaataaatatgttgtcattatctgtttggggaagtggtaccccaagccacctgtcaaccctctccatgatttatgttgcaaacgaaccttctgtcctgtctgtttactccccattcctgtcaacgaaatcctaatctcgtgtaactctgaaggtgtgctggagacagtttctgttttcattatgcaactgttacatgtgtatttcagtgaaatgtcaactcatcaacgaaggatgatgttaaaaattatccaaataaatagttttctatttcttttaatgatacctagtccagtcagttaaatgagagcaagactgttatttaaactggcaaatgttcctggccctatgtcttgagaatccatctgcgttgatgtgcacagtgtacctgggagtgtcaaagagaatgaatataacccatgtttattttatggaaacagaagcaggggtttcaagcattgtgtcttatccgaatctcaaatacgtaatagacctctctcgaaaagtcagacaagggactctcaccactcttcttgtgtcttgagaattgcactctagagactgaatgagtgggtatgtatggccgtactccacatgcccgcagctgaactgagtaagaccttctaccaacacacccctggagctgccttcatggtatttctgaggaatagaggtgggcctgttgcagacctagaaaatgtgctggacataagaatctgagagagagagagagagagagagagagagagagagagagagagagagagagagagagagagagagagaacaaacttccaaaaacacgagtgtatttgtggttagaagggcagcaggaagtagctttttttggcacgccatgaactgtttgggaccctgggatatgctgggatatgcctctttcccttcctgtacattgatatgtatgctagaagactgtctttaccaccttctgtggttacataataagtgtggggtaccatgcttaagcttcatgccatttttagttgggaatgtgtgtttgtcccctctcccaggaactaaggttcctttgcctaacattcctaggtaagacccataaagcttcgattccctagcttgacctttgtccctacaattcatgaaacagaaggacctgctggtgtccaatcacagaagggttcggaacaaaccagcctttttgcagaaccacctaatgaaccagatgttcttgcggatgcagctgttgttataaagggccgcttgagaagtctctggacaaccttacattttgaattaacctttgtcaccaccgatgtttgcagatgaccagctttgagtattttgacaccaggggttctagctcggcttagccccactctgctcacctcctctctccttccctcccctcttcccttgctccctccctttcccttttccaagcatctgtcccaccacagtgtctcaggtgtgagcactgctctttatctcagtccttctcaaagctactcaacttctgtgtggcgctgagaagaaaggccaggaaagtgctctctgcccagggacccagccctccacgactgtcttctgtaaacggccctgaggttggagcacaagctgcttgtccaggcagtgtctttggctccctgctagcttgtaggggttactatttgctgcctgcataccggaggtagaacctaagaccccagagcgactgtggagaaggatgaaacccctgttagtctgaagtcagcatcttgaccttcttcaaattaatgctgaaaactcaattttctcagagcttgtgactccctttaccctgtttacaggccgttcacatggtttccccgacagaggtgtggatgatgcagactttcccaggcccatcatgactgaccccttgggctaaggaaggccagcagagagggtctatggggaagtccagagagctgtcacccgtgggtcttgtactgcctgtagatggtagcaagacctcatcagtctgtgtggtttcagaatcccgccccctctgctagcaggtcctcagtgtgtatgggatatataggccaaggacccccccccccccaagggctggagtggctccactgcacagcagcctcagcctgtgtgactgttgatctgtttccttgtgacctgagtgtgctggtgactgcaatgtatgatgtcacccacctgttccatgctttccagtgagtcagcggccccaatggctgctcgtttctctgctcctaagccagctcatcctccatgcagccaggcagttctcgtcccctcgttctttttaggaacaactagctgatattccttgccctgtttgggactcaggatatgcttctctgcaagcagccttcctgaagagctagtcaggggcatacactgttagctgtgaccattcctagtgctgatagccaggtcatatgctgttgagtggggcatttctaggggaagttacttgatcacaagccttaatgggcccaacgtagctccactgggacctactgacaccccatccctaacggcctaggtcacagttacagttagtcagtacttccttggattggcctttggagaaagcttcccctcctactgctccatcaggctggaccaggcctcctcgatatctaacctgttctgccattttcattgacctaggcgggattaaggaccctgcatgacattgggccagaaatccgacgggctatatcctgtgacttgcaagatgacgagccagaagactccaaaccagaagaagaagatgtattcaaagtaattattccacgcctagcgcctcactggccacatggagatagtggggcgggtggggctttggttagggtggttctgatccgcagaggagtgtggacaatacaaaccaggggcaggggctagagaggcttgcacatcctgccccactccaccctgggacctctctgttcaccagtacctcttgtgggccagaccagcctctttcctgagctttccccggtccccagctgtcagcttctcagctcagccacagcccactgaccacagagtccaggaacattctgggtctttctagcagctgtccacgctgccttccttctgctccagcagttctttgatctgccagccagccctcagcctcccagctcagagaaaatgtcaagtaccctaccttggggctacccaccaagccagctgggcttaagtcacctcatcttggagcgcctggaagaacatacccaaggggcagcagagagcttgcgccccagctcaggacttggtaaccttcctcatttcaggtgggcccactgccacacgagtctgtccacctgaccactgaaagagaggctcaggttgtctctcagggatcctctggagcgtgccctagagtttgtgtttcatgtagagaaaaaaaaaaatgacctaacgtagctaagcctgcatcaaatagttgttaaattacctggtgttgtctcccattattttgcagagaaatggtgccctgcttggaaaccatgtcaatcatgttaatagtgataggagagattcccttcagcagaccaataccacccaccgtcccctgcatgtccaaaggccttcaatgccacctgcaagtgatactgagaaaccgctgtttcctccagcaggaaattcggggtgtcataaccatcataaccataattccatagggaagcaagctcccacctcaacaaatgccaatctcaataatgccaatatgtccaaagctgcccacggaaagccgcccagcattgggaaccttgagcatgtgtctgaaaatgggcattactcctgcaagcatgatcgagagcttcaaagaaggtccagtattaaaaggtaaccttggaaagggtgatgctgttgtctgcccttgtcacacccgctccgcagggccagtcttctgccctgtgctctggcccatggtaactccctggagacatttgtatttgaacttgagagccacttgcctcttggcctctctgtatgtagcccgtgtgagggacctaccacataaggggtcacccactacccaccttctgcatggggtgttctcttaaaacaacagcagccacaaaatccacctccctcagttatggtaacattctttgggacaggggttggtgaatgtcttctgtaaagggccagtattttagttttggggaccattcagtctctcttgcaaaactccccaggtttgccatggcagggtgaacatagccagggagcattctttttttaatttatttatttttattttttattaattaggtattttcttcatttacatttccaatgctaccccataagtcccccaagccccccccactgacctcccacccacccactcccactttttggccctggctttcccctgtactaaagcatataaagtttgcaagaccaatgggcctctcttttcactgatggccaactaggccatcttctgatacatatgcagctagagacacgagctccggggggtactggttagttcatattgttgttccacctatagggttggagacccctttagctccttgggtactttctctagctcctccactggggaccctgtgatccatccaatagctgctgactgtgagcctccacttatgtgtttgctaggggccagggtacattcttaagaaacgaagcagttgggttcccatagagctgtgcgtgtagcactggaatttggactttgtagggctagaaagggcaaaagggttcgctgctttttactttgttttctgccctttataaatggaaaatccctacctagatcgtgggccacacgaaaacagatagtagaccatagctggccagcaaactctggtttgcctgcccccgctccagaagacaggctggtatctgcgcgtctaatgcttttgggaatgtctaactcttcttctccctccttcccatggtatgccttccctggatagaacccgctattacgagacttacattaggtaggtgcttgccgcttctgtctttgtctggaaactgtgctgtcctgttacccactacatttgctcagtgccaagccatcaaagcatttgttctcgaaatgccagagctttgcattcatgaatgggcagttcccacttatttctcacaaaggaaaactggggcccaccagtctgtccactttccctgcccctgtatagctggggaggcctaagctgctttaggggtccagattctcacgtggacttaggagaagcacagcccagacatcctgaaaaccaggccccagatccctctggttaatgtgtgtgcgtgcgtgcgtgcgtgcgtgcgtgcgtgcgtgcgtgcgtgcgtgcgcgcgtgtgatgggataatctcatgtacatgtgttaactagacttccttatgggtggaatggtcactttcctgggggcaagaggaaagggcttcaggatcattgcttcaagtaagaccaggaggttcttggtctgaggagtgaacaaatgagttgctcttagtcgatgtcactgagccctctgggcctcctggggcttgaggccagaaggcagggcatttcatggaaatagtgttccgacatagggcagggaagcctgtggaaaaaatttccaggaacacctctctagtggcagaaaagccagaacttcttcagcagcctcgatttgatagggcaggactgagatctctgtcccaggttctgaagtcacattggctggagctggggtgggggagtggaagtgaaacagctgggaacctagggacttttcgtgggtcccctgacttcagagtggaggactctaggtctgccttgctctgttattcacattacacctgtgtctatgtctcgaggtctctaggcacagtggtttggccctagcactgggcaaggtactgagaccacaagtacacacacacacacacacagaggcacaggcacagggcactttggccagggcctgagtagtcttatggccccggggcagggatgcgtaggaagatggaggcactctgagggaggacacaggctgttgcagaggcatggctgaaggatctagctgccacctcctcaagctctcagatctctttcccaactgcaggtctgagtcaggagatgagcaatttccaaccatttgccgtgaagatcctgagatacacggctacttccgagacccccgctgcttgggggaacaggagtatttcagtagcgaggagtgctgtgaggacgacagctctcccacctggagcaggtgaggggctcagcctgggcagagctcagaagaccagccgtcctctactctgctcctgttgagggctcagagagccacacacactcaggattcctctgacacatcagggcaggagttcaagtttgccttatttcaccctgggccccgggggccctcagaaaggctctggccctgggaactggacttccacggtttcagaccctgccatctcagatgttagattgttttagggggtgggtatttcgaggcagggcctctctacatagcactggatatcctggaactctgtagaccatgctggcctagaactcacagagatctgtgtgccttcatctcaagtgctggggttaaaggtgtgctccactacacctggcctgagagatgagttcttattaactgacataggaacaccagcctcagctatgtttgcatagcatgctggctggagtctcagtgactcctgcttcctatgccaatgaaagggcctcctgaaggtatggggacaagaggtaggaacagcttccctcaagcagaggtgcctcccccaacttctgtcctgcagaaagaatgctgctggctaaaataggcattgtacagggctggagatatggttcaaggatgaagagtgtttgccgtacttccagaggacctgggttctgtttgtagccccccacatggcccgtggtgctaacaactatcacttaactccagttccagggagatctgatgccctcttctggtctcaatgggcattgcatgcacagagcacacatatatgctcacaaaacactcatatatataatatataaataaataaatcttttttaaacataagacacattgcagccagtactggaggacaaaattacctaccccaatccttcctgacccgtgactcacttttttcatcaggctggggccaccaggttgaaatggtgctatggctccttgcctggctcctgagacacagcctcacctttacctgtgctctgacaggcccttttccaccacctcccaccagcgcccaacttccacattcactgatttggagccacatggacctatgtacaccccacctctggggcttgtcatcccaggtctccctctcaggtgtcctagccacccctgctggtctcagtctactttaacagcagcagcaggccagccttcgcatctctcctgtttggaactgaatcatgcccttcaaacaagaacccaaccgtggaactcaccactctctcccactttttacattgtactgagcctgcacactgatggcatgctctaagctccgtgtcctgccgggtacttggagagggcagctccttgggacagaggcctccaggagacgagtaaagggtagccagttgacaagctttgtgtgatcaccattcgcttcgggcctgagggtgtcccaggcatgaaaatgactgccatgtgtcttattccaagcctccagctccaatctccggagatggtccttgttttctacccggaagtttccaccactcataagacagggcttgtaggagttaggtcaagtgttcttgcccagaccctcacaagtgccttctcatgttttctctcactaactgccaggcaaaactacaactactacaacaggtacccaggcagctccatggactttgagaggccccgaggctaccaccacccccaaggcttcttagaagatgatgactctcccactggctatgattcacggagatctccgaggagacgtcttctacctcctaccccaccatgtgaggccagctttcttgtttagggtggagcctcccagagggcaccatgcctgtccccatcctaaccctggattaataattgatgtgtgttaccagggaagtgctggtaactcctaagaccagccagtacctggatagacagtgctttcctggcccaaagcaaaatgggggctctcctttctcctgtacctgtagggtcatccccaaggctctgccaacccctagaagggcatttgaactttgccaagtatgggtgtttgatgatggtaaagaatatccattttttgtgtttcggaggaaagaagctaaattgaggattctgtttaataaccaagaacagtcgaaacacaggagctcccgagcctgactgagcacacaggaaagaacatgggtggccataccccaccccagctgccacggcctgctgggagtctagtcaaatccatttgagtgcttaatatttaattagccccaaacacatgctgctaaatgaagcctttccttaatccatagataccaaacgaaacaggtgtaagtgaggcccagcaggggtctttgccctttggttcctgccacccctcttccaggtctgtgtcttcacttatcccacacctacatggccaaggggacacttgagtgccctggtcccagggcagtccagtttgcagacctgggcgagggggaacatggctaaactggcctgtatgcttagccattgggagtaggtaagggcagataagtgaaagagctatgtcttacagaggctgtagtgcaaagctcactggatgaggggacccggggcttattttagcagtagatcctgaatggatgggaggggctgtttttcttccaattccaaacagctggcctgcctaggtcttagggtctagaggttgtgccgaccgagagggccgttttctgtggttgcactggttagcaggcaaggcgtggtcctctttataagtagtaccagctcacctgggaggccctggcatacccctcagtactgactgtttccactccactggccattgctggccagccaatgaccaggcttggcctgttcttcatcgtggacctggctttttgtgaagtccagggtgtctgggaggcctctttggtccagtgtctgaggatccactaaccgagggcttgcagaagcctagcagtacagaaagtacagttggagtaatgcagagcacaggtcggggatggggagggagtctccctgaggcccacgacagggtggacaagcttctaggactcggctgtctttgccaaaggatcccagaacactaagcctggtacactataaacccagaagctgtggaccatcagcgagcctctatctgcaactgctgtcagcacacagcaagtacttagatacactcacatctaggctagggaaggtgggttctttctaggcaaagaatttggttattttccccggttaagctggttgacggaatccctcattttgaaaacagaggcttaaatatggggacctcagaaagatgcagagtgtttgtagggcagagataggatagcatggtgcgtctacgattctagaatggatctctacaatacattccggggcttgtaacttagcacagattccactgggctgcctgagagcaaacatttgaagtgattcattgctcccttatcgaaacgtcccacagctggcttgctccttttagccttcccatccctagttggggcattatgtaattgtttctcttggatgaagcatgtggcctgcttcttcctggcctccttgctgaatgcctcagaaagtagtcttgactctcaggacacattgtccagacagaatttatatcactacagcatcctgtgcttttgctccgcagcccatcggaggtcctccttcaactttgagtgtctgcgcaggcaaagcagccaagacgatgtccttccatcgcctgccctgcctcaccgcgctgccctgcccctgcacctgatgcagcagcaggtgagctgctctggccccacctgggatgcactctcccctggggatacacatggaggaagcaaagagcctgccccttctaatctgcttatccttgagcagcccttcctggtagatcccccagggcccattctgctggagttgcacatgcagcaaagggtggaccgggcatccttggatccgtgcttcctgtcagaggacactggtatagtctgagttaaggcaattacagacactcataagagtcccattgatggctgctgctactaattattccttcagagaggtggttccaccatcaagccacttgggcagcttcttgtgcatgaaccctctgtccatgagagtgggttaagggggcccacatgctcacatgaaaggcaactgagcctgttcaccagggcttaaggatagaggtatgcatgcattacatatatatgtgtagatatgtatgaatacatacatattgtcttaggatttcgttgctgtgacgagacaccatgaccatgacaactatactcttagaaagcaaaacatttaattgaggctggcttatagtgtcagaggttcattccactgtcatcatggcagaaagcgtggcagcatacaggcagacatggtgctgtaggaagagccaagagttctacatcttgatccaaaggcagtcaggaggaggtgctcattccacagtgagcagagcctgagcacaggattgtcaaagcccaccccaacagtgacacacttcctccaatagaccatgcctcctaataatgccaccctctgggccaaaccaccacacatacagtctttatatttcctgaactatctcatcagaagagctgtgtgggctgattgatgaagggagatgtcagaaacctgcacccagccagccagccagccagccagcagatctggatctctgtgaggttctgaccccaagctctaacccatatgtactcagtggccattgcagattttctagtcacctctgccagcacttaaaatatttgttttggagttactttattttacatgcctgcatatgtgtctgttcaccacaggcatgtctggtgctcttggggtttagaaggcatcagatccccagaactggagttacagatggttataaactacccatgtaggtagtggggattgaacctgggtcctctggaagataaattagtgagctcaaccactgagcccatttgcctgtatcatcatggaagaaagataaactttttggaaacccagatcactcgatgccaaacctcagacagccaaggaggtctaaaagaggcctgtgacccacagggcagaatcccaagtcttacctcagccactggcctgggttgtcctggattccttggctacaactacagtgtcagtgcaaaccggcattagcagacatctcaaggtggctctcccatgagggacatgtgagaatcgtgactgtgcccggcatttcagggcacactcactgcaggatggcaggccttagagccgagagacatggttgttgtcctgaatgagccagagtccctgaagtgtgcttcagtactgaagcctggagaggcctgggtagtatgttcacacatcacagcttatccatcttccctcctcatccccaagtggttacgtaagttagtaactgacagttcagtcatagagaaggccctatggcttggagaaagaggaagcccagtcttttttttttttttcactttcacattatgaagtttggctgccaattcgtatatatgaatgcatgacagtgcaactttttttttaaagatttatttattatgtgtaagtacactgtagctgtcttcagaagagggagtcagatctcgttatggatggttgtgagccaccatgtggttgctgggatttgaactcgggacctttggaagagcagtcgggtactcagagcagtcgggtgctcttacccactgagccatctcaccagcccggaatcccagtcttttattaatccctggttccctggccagctcactgagtggcctctgctacacaggcatcttcccccaggtttttgagaagcatctctgcacagctgccatgtgccagactgggaccaaggctcagacctctctctgcttctcccgctcagatcatggccgttgcaggcctagattccagtaaagcccagaagtactcaccgagccactctacccggtcgtgggccacccctccagcaacccctccataccgagactggagcccatgctacacccctttgatccaggtggaccgctcagaatctatggaccaggtcaatggcagcctgccatccctacaccgaagctcctggtacacagatgaacccgacatctcctataggactttcacgccagctagtctgactgtccccagcagcttccggaacaagaacagcgacaagcagaggagtgcagacagcctggtggaggcagtgagtatgggtggcctttgacctctggacaaatcttaggtggcagcagaaacagagccatgatcacatggggagggggcagtggtgggctctgcagccttgccacccgagggtggcctctcggcagcatttaaggcctgagtgaaaaccagctggcactgccaagtcccaccagagagtcccatcctgcagtgccagtctgtgctacgtccccagtgctttctctcttgctcagccttgtggagccactcagctttcgacaccaacagagctgagctcatttatggttagcatcgtgtataaagtttagcagcatggctgacagcgtccccagagcatgccgcgcactgagagctgatgcagaccttccctcatgccatcgatctatctcctatacaggtcctgatatccgaaggcttgggacgctacgcgagggaccccaaatttgtctcagcgacaaaacatgagattgccgatgcctgtgacctaaccatagacgagatggaaagtgctgccagcaccctgctcaatggcagtgtgtgtcctcgagccaatggggacatgggccccatctcccaccgccaggactatgagctccaggactttggtcctggctacagtgacgaggagccagaccctgggcgagaggaagaggacctggcagatgagatgatttgcattaccaccttgtagcccagtgagggcaggctggctccagccagagacgggcacgggagggccagggataaagtgcctcataattaggaaagtttaggcactagttgggagaaaaacgctcaattagacttttgtacaagtgatttcatgcctcaaggaagccataaacctggtaggagcaggttctgagcggcctggcatgtgctatgtcacatgctcaggcccggcctcagaagacagtatatctggcctgcacagaggccagagggctgcccaggagttggtgtctcccatccagggtgcatgcccatgcccctttgcctgcagacatgagagaggttaaaggtgatgacagtcaccacgcctgtgtcattacctcaaccattggtctagcatatcagacacccactgggcctggcatatccatttctgagccccctcccccaacacactggttcctggtttctgtggagctgttctgaatggtacacatcagaacccagccactagtggtcacgacaaggggagtgggaccggatcgttttgttaagcgatgccagtttacataagagaccatcactcagacggtcagttctgtcacattaagggcaactgtaaactggaagagtaccgcacttgcaaaccaggtaaaacttagatacgtttagtttgtttaaaaattatagatttactgtacatgacttgtaatatacaatttgtatttgtaaagagatggtctatattttgtaattatcgtaccgtatttgaactgcagcaatatccacgggtcctaacaatcgtagtttcccacccaaacctagaaattattagtatttttacttgggctaaaaagaattaggagaattagagccaattctcacatgttcagtaaaagaatctttggggataaacttttgagttcctaagaacttggcacttcagaacttttttctaaaatattttgagttactataaacctatctttccgtaagatatcaagttgactaatttgcagtcttttctttgggttctatgattttatagtgcacctcccacccacatgggttgccgttgactttggtttggttttattttcacaaccctctggtcagttagttatgcagcaggtccagctggctactcggcccagtggcatccactggtctggctccctcagttgcccacgcaggatgcttctgggtctctgacgtggagctgcacagatgagctgcccacgtctgctcacatccccaaggatgcttaagatctaggaggtataccacaggaggggagaggggagcaccgtggtgtcctgtgaatgcaggtggtctgtggagtcctgtcgcctttcacagctgctgtgcaggattctctttgagagctgtcacacacagcggagcaagggctgaagttttcacgagaacacaagcgctctgactgcacacctggggacagttagctttggaatcgttagaactgtcaagatttcctgtcagcatcatgagatctcatcccatcactttcctaaggattctctgcaatcaaaaatacaggtagcaatttgggttcaaaatttttaactagtacacagacaacctgtggaaacaatttttttttttgtaaataaattttattataaagacctcgcaaacctcttcggaagacattcttactccagatgcaggcaaaaacacttcaaggtttgtaaatgactatttcctgacataaagcctttttttttttattaaaatgcaaaacgttcttcagaataaactctgtataatgtcatcatatggggagctctcctcacacagctggctctactgggggagcttcgggcggctttttccgcccttggtctccgagaccgatagtaacttcacaccagctgcagagtgctgttctcctaaagggctaaactaccatcagcatttaccttggactctgtcgtgctgggtgtctgtctgtctgtctgactgtgcgacgtaacatcagcagatcacactcacgtgtgttctggaatgggtgatcgttcccaaagtcagctgtcaacgctgcctggcgtttcaggctgtccttcccggtatgtctgctttaagcctggttcaacctctcatttaatattaaatttctctttgtaagaaaaatttgaagttgtagagcatggttttttcctcccctttaaggaagttttaagactaaatagttctgctttttggttttcctaccctgccccacccccccctgatattgaggtctttggaatgctgcttttagtttaagctcctgcttttaatgacattaaaaggtggaagtcactatgatctgctcaccgtcagcaagaacctcatttgggatggtctgtgaggtatgtggacttgtgctccatagttctagaaggttgagggtgtagccctagccacttgaagagagcatagctggggtgcactacccacttcacagtggtccagctcttaagccagatcggctctattttgtgctgtgtgctttttactatctacgatctttatcagctctgcctttacttggggaggatggagtgttggtttacttgtacaaacaccaccaaatcatgggcacctctcacaaaacccactccagctgtgctttcccagagggcagtggagacctagggagaggctcggtctctggcttctgatttcagaacaagggtgaagagtgtggttgaatatacaacagcccagccagcaggggcttcgcaggtcaccagcttgggcctaggaggtaggtcatgttttccccgcccccctccaaatttgaagattaaaatctttgcattaggtttgatattgtggtagtttataagtggaaatatgaaaaatcttggggcctgagggatgtagtatggtgggtgagaagaatctatttgaatgtatggaaatgaggcagggctcatgtgttacagtgtccccaccttctgcttctatgactgtgtctggtcatgctggcaagttgtccctgtctccatccatgatctgtgaccctgtcaggaacacacttggccaacagtgaggtgggcccaagtcccatcaacacagcagggctccccacagttctttttggtgctaggggtcaaccctggggcacatgcttgctaggtgtgcaggtactggttttggcaacatgtggccttccatgattggggtattacaggctctttgccaaggagcctacttaactaagcctttccagtttccccaggagactcagtcttaactgcctgtgtgaaccccactttagaacggaagcaggactgcaccattctaccactctgtctcccttgtggcactgggacttccagacaaccccagcatgtggattcagcactgcaggcaagactctcctgcgtgttcatccgttctgtttgggctggaacctggaatagctgtcggggcttcagcgaggatccctccaaacctcatgttctgtcccgatgtcgccatctgtgagttctgggcacgtaacatcgacttcttgtctcgggaaactcgtttccttatgtggctaaatcatgtcagcacgtgaagccagcctccctatgccgaagtgagagaaaggcccgactgcaactgaggggcacgccaggttgatcttcgcttattctcaaacgccgctgagcctgagaggagaacatggccctcccaggggtgacacctgtgctgctaaagatgctacggatgacggccgtctaacacctgccctgtgaggatctcttggcagacctaggatttccttgatcttctttttgaacaggaaaaaacaaaacaaaaaaacaaaaaacaaaaggcaaagcaggtaagatgaaataagggcaaccttgttttcaaagtaaaagtgttggtttataatttgttttttgaaccctttgaagggtcttctcagactcagaagtccagaaggcagctcctgccagtcaaccctaggggaccctggaatcctgctatttcctctctcttcttcactcagccatgtgatttctatacagcgatccctttcttcccgactacagatgatggctttggacatcttcaggaaaactaacctacaatgcgtctgacccccattctctcataagaacagttggaatgaggcagcttggctcaaaaattaagttaccggttacatccaaatttatgaggaatttccagatcaaagagctcttgtaaatgctgctggtatctgctcccctgacccaagactcgaattctagctggtttatctttcactccaaagtcctttgctgttctccatcagccttggtgccatgctctctgttctcacgtctagagaataagaaacggccagccctgtctgcagaagtagctctggtgcctgggccatttctggggccaccatgaaaggacctcgtgggctcatgtccttggcatgaggtagtgactggcatgtgggactggctctatactcctgcacttttgtgtggtaagggttaaacaataaaacctttggcagtgaggccaaaatggccttttcttgaacaacgtcctgcaagcctctcacctggacggtttcatgagagccagagtggtaggcgttgagttgtgcagtcacctgagccctcgtccctgtgcctcgctcttcagatttaaatcagggcaggagagaagtgcagagggggatgaggcgtcctctagctgctgcctgtccctctaattggggacataagctcaggtaaccagcccagctgagctgctacctgcctcttggcttcagcaaaagcttccttggagagcccagtccagttcaaccaccctgactttgcaggaatggcctcaggtgggagaccagggaaaggatcatcccagtccttcctggaagcagagctctgaactggagacaagaaaaccatgttagctaccccacctgctacccgcaggcagccagggggagggccccagcttgcttgctaggctttttgtggaggggcatcagagagacactgggaaaagggacttgcctcactgcctaccatgacctcatttcctcagaaaccatgaaagtctgagccaagagtcggggtatctgggtcccgagtgtctatataccggttcagaaatatctagggcagggctgtactggctggatctcttggcttggcctgagttcctctgtcgtcctcaggcaatggctgtctgtcttaacgctgggtgtccagagtctggggcttgtagacaggaacattcttgtcctcaagtgcagggtgtcccttaataatgtcggctgctttctctgcaatcattaccgtgggagcgttcaggttgccgctgaccacgctgggcatgatggaggcatcaacgaccctgaggttttctacgccgatgaccttggtttgcgcgtcaaccacggcagtggggtcagaggaccggcccatcttacaggtgcacgaggggtggtaagcactgtctgcttttgcccgcacaaaggcatctatctctttgtctgactggacgtggcttccgggctgcagctcttttccccgaaatggagccaaggcttcctgggcaaaaatttctcgtgacagcctcacacactgacggaagtcctcgacatcggtttctgtggaggagaaataagtgaggtccccttctcttactctgctggccaaaccaggggacaaaggtcagggacatggagaaccaagctacaagtgctttgttacctgcccagaggcagttagtggcaaccaggtatcttagacaaacagtgccaggtttgtgtctgaggtctggcatctctgtaagccaggggtagagatgtatagtctatctctactgccatgttcctgggaggtaagaccttgatcatgaggcatgagtctctgtggtgcgtgcaaagaggcaggcttgggaatacagcgtgctctctggcagggaaggccaggcaggtagtatgcacaggcctggcaattgttcctcctacagacgggcctgaaagtggtacctctatcctgctgtgctgtgaggcccaggctaccttgtgtgacctagaactgagggcaacccgagtgttaagcagtaggatccagagtaagggtgagggacaaacggaaccttattaacattccctaactcgatggcaggcccaggggataccaaagtagcgtctgtgttgttacctgttgacaagtagttgggatggatcacagggtggtcccgggggttggcacttctcagtttcagccagcccacacttgtggccctcatggttcccacgtgcacctagaagggttcagaggtaacagttcacagtaatctccattagctacagctcagacacttagaggagccccaggttccctgtgggtgggcactcagcatttagtgtacagacctccatcctgtctggcctttactcctttgtctgaaacgttcatgggacgatccccgggctgaggaagtcactgtaacaggtcctcccccccccacacacacacacacacatcctgtgggccgacccctgggctcactccctggggtgagtaaggttagggctccctttcctcctccagtcagacagtaggcattgtgggcagagtactaaacggaggtctccatggtgggatagataacatcaggaacatctattctaatgcaggagcatggaggcagagtctctggccatggctggctgcatacctggtaagcttcctgctgggtgggtttccgcccatggtcaatcacttgcgatggcaggaagtggaactggatgtccggatgagggaccccaggtcggctgcggatgaaccctccggtctcaagatgggctgtggctccgtcccctgaaggtcacatgaggacaaggcagaagagctggtcagggtacagcagatggcccagctctgcccggtgtccctcttctcccctgtgtctatcttcctggcctcggggctcggcaccaggttcgtccataaccttccttcattccccgggcagccatacccagcgttacaactttaaaaacactagctccatgctaagcgaggggcgtcaggtctgccaaggccacttgtgttatgtgcccttcgtcttgctgctcagtgagcgtcacctcgagcaaggtcctgtgctcagtccctcgacgtgtgctactactgcctcttgtacccttgcagagacctgccagacaggacctttgtgccctcacctcacagagtggaaaaattggcttgggttgtcaactggctttatacctagcaacctgaggcccgtcttggctcttcaggaagaaaaccacgatgcccacagaccgtagccaccaagtaccccaggaggcagcccccacctgtgtagctccagagccactccaggccgatgcagaccttccgcagaggcttctgggcagagtggagggtgatgggctgtgtgcacgcttgctgaacgtagacctccaggtggtcctgcaggttctgcccaactcctggcacaggaaggaagggttaggaaaatggctgacacaggggtgaacccctggctttggaagcttctctctagtccgctttgtcttcctgcctgccctggcccccagcttggaagttgtttccctgagacatgtcttttgctctcttagacaagtctggctctttctccaatgctgctaaaaccacccactctgtcactctctctacagcaatcactcaggtgcccttggtcagccctcctcagcagcgccctccaaggacagggcccacagttacaacaggtacttgggaagtgtcactgtgtgtgtgctggccaggttgacacttgtcagctccatcgtctcccccagcctgttaagggagaggcagtcccaacagaccctactcaagctcatgcaagatcaagggtacactgggcagtcaggacacagactgcttccataggcctccaggaaagcttcccgagaaaggccagccctcagggacacaacacaccctttctaagatgaagcttggatcttcacctgaacagtggcttgctctggagccataggttggcctcatttgtgcttagagcaactggtaaatcttaggatagatctctcacaccacaaccccatcctggtggtaatctcagccccatgcctgctacaggatgctctcctaaagggtgcagaagctgcctgagggagggtgaaggaaaatagcataaagacctggggttctccagtgagacccagatgccctcagatgtataggaaggaaggatgtgacaccttcaagaagtatcccaccgccacttcaagcaacaggctgctaggttggacagagctaccttccgggcagcagtcagactcaccaggcaggtggcacaccacagggatatccagtttcctgaggtcatctgcattgccaacgccagagagcatgagcagctgtggagagttgatggctcccccgctcaggatcacctccctgctgacgtaagcctggaagaggcagagctcgaccaatcacacttcctgaaaagccagctgtttgactgccccgtggagaggcacccagttccagccattgctgggcctttggaaattacaccactgtggagaatctgttctcagatcctagatagagaacagaggagggggccggctggagggctacttaaaaatgatccgcacagagtccccatgggtgactctaagtaacagctgtaacagtaacgggggccttggaaatggggggtgggggtagagctcaagtagatgatagcatacacttcagtgatttgaagcaagcacacaaatagatctcctgagaagggaaggcgggggaaggccatctctgacatatcgccaagtgaagaaaagcaccaaatatgattccatttgtggatttttaaacttctagggttgatttaatggtttctggcaggccagaccctgaaaccatatactagaggactctcgtgggggtagatgtgacaggcagaggcttacggaggcacaagggaccatggagtctgcgggtggcaggagttgaggtcttctgacctctacatcctgtgggaccccagggacaagcctgccactgctactggctgtcaactcatcctaggaacaagagcacgtgggacaggagcaagagcctgattgcctgtccccttcctgccctcttcagtccccacacgttccacaggaagtcaactcaccttgtgtctctggccgtccttgatgtactccacacctactgcacgggtgccctcaaacagcactctgcttacaagtgtctggacctcggccctgaggttggggcggctcagcaccgggtgcaagtaggcgcaggctgtgctccagcgcttacctgcaggatggagcgaggtcagccatggcctgctgccctcccctcgtgcctggacacgaaactactggggaaagcaaatctagccctcccttgacaatgcaaggcccaccttcaaaggtatgtctgtgacctggatagcctaccctgcagtccaaactattgagagccccatggtttgctctatcctgctgtgtgcaagggtcccgtgctacctgctgtctgtctacctgcatccatctaccaagaggtgatagctgggacacgatggtcttgtgctgtctctttctgcctcagcttgctcatctgcaagtctctataacgccatgcgttattcattacacagagctgttccttcactcttccacagcccctcccctccaaccactacccctagtggggtccactgtgttttccctggctacaggtaccacaggactgaagtccctacccctctcagcttcctagatctgtgactatagggtttggctgccctatccaggctggacaggcccctgggaactctaaagtcacctctgctatactgcatgacctagaggcacagtgaatacccaagtattgggttgtatcctgtgatacctaggggccgtatatagtatctccctctcaccaaacaccatgctgatttgcttactgaccatgatggagtcaggaaggatgcctataattagaggtgggggctattaaaaatcagtaccctgggggctagagagatggctcatttgttaagagcactgactgctcttccagaggtcctgagttcaattcccagcaaccacatggtggctcacaaccatctgtaatggatccggtgcccttttctggtgtgtctgaagagagctacagtgtactcgtatccattaaattttttaaatcggtaccttggtggacagtcatgtccatccagccgaagccctcctgttggaagccattcatgtcttcagtgaaggggtagccagcctgacgtgctgcctgcaggaaggcctggtgaagcgggtggttggtcttgccccgagacacatgcagtgggccatccccaccgcggtacatattggcacccagctcatgtctctgcgccttgcggaagtagggcaggcagtgtgcatagtcccaaccctcagcaccttcacggtgccagcggttatagtcctcggcgtgtcctcggatgtagaccatggcattgagggatgaggagccaccccagacccggcctcgtggccagtacagcacgcgactgtccatgccgggctgaggctcagtgtgatagtaccagttgtatttgtcatcacacaggttggacacaagggcagccggcatgtggatcttccactgaagccgcttgctccccatcaacaagtccttaggtcctgcctctagcagcagcacccgatgattcgggtcctcggtgagccgactagccagcacacagccagcagagcctgcgcccaccaccacaaaggtgtactcatccttgcccacactggcaacagcgcggctgcaaggggggcatggctggccctgcacagcccatgccagggctccacgtgggctctgccatcctttcctccagcctctaaggacctgccacatgcttccagcccagttcctctatccaccgacaggagttggaagagtcttttcctagaacaggaaacatggttttaagactctcaactccactgcatatgtagaagcagcctggagctggttggttatgcctagcttgggcaaggccatggcgcatgatagccactgccctggggaggtagaacctgaagtagagattttatcatggagatagtagtccagaatgggcgttggggaagaggggaggcccctccacaggcttggaagttgttccctggacaactttcctgagatggccataggaacttggagactgggcatctagctgctaaacgggaggaaggctttccagcctgaccaacaaggggctattctccttacttcaggcaggatgctgcattttattacaggaatgcacaagaaagaaaaaaaaatagaaaagctctccagatggagagggacaaagtaggctgagggactaagacttgggagctcatagcctgagagatcccaggacgcactaggacacagggtcacagccatgctttgcaaggtcaacttgtaaagcggtagctttgacagagaaatgccaatggcctaaaaataatgttgatttgtttttgcttttgagatctttccctcccccctcccccaccccggtaccccatctcactctctttcaaagtcatagcctctttttcttcaatagttgttacgtgtaaatatatgtgattatggaaagcgacctgctcagacctatatatgccaatgacttttgatgggtcttctctcaccaatgtcccacatgcttggtgcaaaggttgagaacagcctcagtatgccactgacctcgtgaggacaagagcagctgaaccccgcaaccccaacaacaacctctagtctaccctgaagctgaaatgaaaggactgaaaagtcccttgtcaactttggcctgcccagatgcagatgatggcaaatcccccttagctttccctcagtcctgtatcagtaaccagggcctttgacaaaaagtggtagggccttctggagcaagaattctgcagagagtcccctccacccccagctccagggtagcaatgcccatgctctgctctcccggggatggactcacttcccccaatgccctcccaggatagttgcggcctttgtaagaggacgccattacccatctccattagactgctacacacgtcagtattccattataatttggaaacacacaaatacactctttacaaagagagaaagcaagcaacagaaccagagcccccaggtgttgtaactatcagacaaagactcaaagtcaaggtcacagctactagaaatgatttcgttgacaagaggacatgttgaagggactttcaagtaggcatcagtggtctgcaaaggtgactctgtgggcaagggcacttatttcataagcctgaggaccccagtttaa

SEQ ID NO: 1145 - DNA, 7660 bp, Mus musculus
gaaaaagtagaatatgccttcctgattatttttacagtggagacatttctgaagattatagcgtatggactgttgctgcatcctaatgcttacgttaggaatggatggaatttactggattttgttatagtaattgtaggattgtttagtgtaattctggaacaattaaccaaagaaacagaaggcgggaaccactctagtggcaaatcaggaggctttgatgtcaaagccctccgtgccttccgagtgttaagaccacttcgacttgtatcaggagtgcccagtttacaagttgttctgaactccattataaaagccatggttaatgatgcgataggatgggaatggccatgggtgtattttgttagtctgatcatccttggctcatttttcgtccttaacctggttcttggtgtccttagtggagaattctccaaggaaagagagaaggctaaagctcgtggagatttccagaagcttcgggaaaaacagcagctggaagaggacctcaagggctacctggactggatcacccaggcagaagacatcgatcccgagaacgaggaggagggtggcgaggaaggcaaacgaaacactagcatgcccaccagcgagactgaatctgtcaacacagagaacgtaagtggtgaaggcgagacccagggatgctgtggaactctctgccgtcgatggcgtcgctggaaccggttcaatcgcaggaggtgcagggctgccgtgaagtctgtcacgttttactggctggtgattgtcctggtgtttctcaacactttaactatttcctctgagcattacaatcagccagactggctgacacagattcaagacatcgcaaacaaagtcctcttggctctgttcacctgtgagatgctggtgaagatgtacagcctgggcctccaggcttactttgtctccctcttcaaccgcttcgattgctttgtggtgtgtgggggcatcaccgaaaccatcctggtggaactggagctcatgtctcccctgggggtctccgtgttccggtgtgtgcgcctcctgagaatcttcaaagtgaccaggcactggacctccctgagcaacttggtggcatccttgttaaactccatgaagtccatcgcctctctgctgttactcctcttcctcttcatcatcatcttctccttgctggggatgcagttgtttggtgggaagtttaattttgacgagactcaaaccaagcgaagcacctttgacaactttccgcaagcactcctgacggtgttccagatcctgacaggtgaagactggaatgcggtgatgtatgacggcatcatggcctatggaggcccttcctcttccgggatgattgtctgtatctacttcatcatccttttcatctgtggtaactgtatcctttggagccactggaactatgtggtcaccatcactgtctcgtttcttctgactttctctgtggttgtggtggtgacggtagcagctatttccaaattagatatcctgctgaatgtcttcttggccatcgctgtggacaatttggctgatgctgaaagtctgaacactgctcagaaagaggaagctgaagaaaaagaaaggaaaaagattgccagaaaagaaagcctagaaaacaaaaagaacaacaaaccagaagtcaaccagatagccaacagtgacaacaaggttacaattgatgattatcaggaagatgctgaagacaaggacccttacccgccctgtgatgtgccaggtattatatgcggcagagaggcccagaagggctttcagatacgtgtgggttgccacaagctcattaaccaccacatcttcaccaaccttatcctggtcttcatcatgctgagcagcgctgccctggctgcagaggaccccatccgtagccactcattccgcaacacgatactgggctactttgactatgccttcacagccatctttacggttgaaatcctgttaaagatgacaacttttggagccttcttgcacaaaggggctttctgcaggaactacttcaatttgctggacatgctggttgttggggtgtcgctggtgtcctttgggattcagtccagcgccatctccgttgtgaagattctgagggttttgagggtcttgcggcctctcagagcaatcaacagagcaaagggacttaagcacgtggtccagtgtgtctttgtggccatccgaaccattggcaacatcatgatcgtcacgaccctgctccagttcatgtttgcatgcattggggtccagctgttcaaggggaagttctaccgttgcacagatgaagccaaaagtaaccctgaggagtgcagggggcttttcattctttataaggacggcgatgttgacagtcctgtggtccgtgagaggatctggcaaaatagtgatttcaattttgacaatgtcctttcggctatgatggcgctgttcacagtctcaacttttgagggctggcccgcgttgctgtacaaagctattgattcaaacggtgagaaccgtcagtgtgttgaatatgccttgaaagcacgccccttaaggagatacatccccaaaaacccataccagtacaagttctggtatgtggtgaactcctcgcctttcgaatacatgatgttcgtcctcatcatgctcaacacgctctgcctggccatgcagcactatgagcagtccaagatgttcaatgatgccatggacattctgaacatggtcttcacaggggtcttcactgttgagatggttttgaaagtcattgctttcaagcccaaggggtattttagtgacgcctggaacacgtttgactccctcatcgtaatcggcagcattatagacgtggccctcagcgaagccgacaactctgaagagagcaatagaatctccatcacctttttccgtcttttccgagtgatgcggttggtgaaacttctcagcaggggggaaggcatccggacactgctgtggaccttcatcaagtcctttcaggcgctgccgtatgttgccctcctcattgccatgctcttcttcatctacgctgtcataggcatgcagatgtttgggaaagttgccatgagagataacaaccagatcaataggaacaacaacttccagacctttcctcaggcagtgctcctactcttcaggtgtgcaacaggggaagcctggcaggagatcatgcttgcctgcctcccaggaaagctgtgcgacccagactccgattacaacccaggagaggagtacacttgtgggagcaactttgccattgtctacttcatcagcttttacatgctctgtgcattcctgatcatcaacctctttgtggctgtcatcatggacaattttgactatctgactcgggactggtctattctggggcctcaccacttggacgaattcaaaagaatatggtcagaatatgaccctgaagcaaagggaaggataaaacaccttgatgtggtcactctgctccggcggatccagcctcccctggggtttggaaaattatgcccacaccgagtagcatgtaagagattggttgccatgaacatgcctctcaacagtgatgggacagtcatgttcaatgcaaccctgtttgctttggtccggacagctctcaagatcaagactgaagggaacctggagcaagctaatgaagaactccgagctgtgatcaagaaaatctggaagaagacaagcatgaagctgcttgaccaagttgtccctccagctggtgatgatgaggtaaccgtggggaagttctatgccactttcctgatacaggactactttaggaaattcaagaaacggaaagagcaaggactggtggggaagtaccctgcgaagaacaccacgattgccctacaggcgggattaaggaccctgcatgacattgggccagaaatccgacgggctatatcctgtgacttgcaagatgacgagccagaagactccaaaccagaagaagaagatgtattcaaagtaattattccacgcctagcgcctcactggccacatggagatagtggggcggggaagcaagctcccacctcaacaaatgccaatctcaataatgccaatatgtccaaagctgcccacggaaagccgcccagcattgggaaccttgagcatgtgtctgaaaatgggcattactcctgcaagcatgatcgagagcttcaaagaaggtccagtattaaaaggtctgagtcaggagatgagcaatttccaaccatttgccgtgaagatcctgagatacacggctacttccgagacccccgctgcttgggggaacaggagtatttcagtagcgaggagtgctgtgaggacgacagctctcccacctggagcaggcaaaactacaactactacaacaggtacccaggcagctccatggactttgagaggccccgaggctaccaccacccccaaggcttcttagaagatgatgactctcccactggctatgattcacggagatctccgaggagacgtcttctacctcctaccccaccatcccatcggaggtcctccttcaactttgagtgtctgcgcaggcaaagcagccaagacgatgtccttccatcgcctgccctgcctcaccgcgctgccctgcccctgcacctgatgcagcagcagatcatggccgttgcaggcctagattccagtaaagcccagaagtactcaccgagccactctacccggtcgtgggccacccctccagcaacccctccataccgagactggagcccatgctacacccctttgatccaggtggaccgctcagaatctatggaccaggtcaatggcagcctgccatccctacaccgaagctcctggtacacagatgaacccgacatctcctataggactttcacgccagctagtctgactgtccccagcagcttccggaacaagaacagcgacaagcagaggagtgcagacagcctggtggaggcagtcctgatatccgaaggcttgggacgctacgcgagggaccccaaatttgtctcagcgacaaaacatgagattgccgatgcctgtgacctaaccatagacgagatggaaagtgctgccagcaccctgctcaatggcagtgtgtgtcctcgagccaatggggacatgggccccatctcccaccgccaggactatgagctccaggactttggtcctggctacagtgacgaggagccagaccctgggcgagaggaagaggacctggcagatgagatgatttgcattaccaccttgtagcccagtgagggcaggctggctccagccagagacgggcacgggagggccagggataaagtgcctcataattaggaaagtttaggcactagttgggagaaaaacgctcaattagacttttgtacaagtgatttcatgcctcaaggaagccataaacctggtaggagcaggttctgagcggcctggcatgtgctatgtcacatgctcaggcccggcctcagaagacagtatatctggcctgcacagaggccagagggctgcccaggagttggtgtctcccatccagggtgcatgcccatgcccctttgcctgcagacatgagagaggttaaaggtgatgacagtcaccacgcctgtgtcattacctcaaccattggtctagcatatcagacacccactgggcctggcatatccatttctgagccccctcccccaacacactggttcctggtttctgtggagctgttctgaatggtacacatcagaacccagccactagtggtcacgacaaggggagtgggaccggatcgttttgttaagcgatgccagtttacataagagaccatcactcagacggtcagttctgtcacattaagggcaactgtaaactggaagagtaccgcacttgcaaaccaggtaaaacttagatacgtttagtttgtttaaaaattatagatttactgtacatgacttgtaatatacaatttgtatttgtaaagagatggtctatattttgtaattatcgtaccgtatttgaactgcagcaatatccacgggtcctaacaatcgtagtttcccacccaaacctagaaattattagtatttttacttgggctaaaaagaattaggagaattagagccaattctcacatgttcagtaaaagaatctttggggataaacttttgagttcctaagaacttggcacttcagaacttttttctaaaatattttgagttactataaacctatctttccgtaagatatcaagttgactaatttgcagtcttttctttgggttctatgattttatagtgcacctcccacccacatgggttgccgttgactttggtttggttttattttcacaaccctctggtcagttagttatgcagcaggtccagctggctactcggcccagtggcatccactggtctggctccctcagttgcccacgcaggatgcttctgggtctctgacgtggagctgcacagatgagctgcccacgtctgctcacatccccaaggatgcttaagatctaggaggtataccacaggaggggagaggggagcaccgtggtgtcctgtgaatgcaggtggtctgtggagtcctgtcgcctttcacagctgctgtgcaggattctctttgagagctgtcacacacagcggagcaagggctgaagttttcacgagaacacaagcgctctgactgcacacctggggacagttagctttggaatcgttagaactgtcaagatttcctgtcagcatcatgagatctcatcccatcactttcctaaggattctctgcaatcaaaaatacaggtagcaatttgggttcaaaatttttaactagtacacagacaacctgtggaaacaatttttttttttgtaaataaattttattataaagacctcgcaaacctcttcggaagacattcttactccagatgcaggcaaaaacacttcaaggtttgtaaatgactatttcctgacataaagcctttttttttttattaaaatgcaaaacgttcttcagaataaactctgtataatgtcatcatatggggagctctcctcacacagctggctctactgggggagcttcgggcggctttttccgcccttggtctccgagaccgatagtaacttcacaccagctgcagagtgctgttctcctaaagggctaaactaccatcagcatttaccttggactctgtcgtgctgggtgtctgtctgtctgtctgactgtgcgacgtaacatcagcagatcacactcacgtgtgttctggaatgggtgatcgttcccaaagtcagctgtcaacgctgcctggcgtttcaggctgtccttcccggtatgtctgctttaagcctggttcaacctctcatttaatattaaatttctctttgtaagaaaaatttgaagttgtagagcatggttttttcctcccctttaaggaagttttaagactaaatagttctgctttttggttttcctaccctgccccacccccccctgatattgaggtctttggaatgctgcttttagtttaagctcctgcttttaatgacattaaaaggtggaagtcactatgatctgctcaccgtcagcaagaacctcatttgggatggtctgtgaggtatgtggacttgtgctccatagttctagaaggttgagg

SEQ ID NO: 1146 - protein, 1755 aa, Mus musculus
EKVEYAFLIIFTVETFLKIIAYGLLLHPNAYVRNGWNLLDFVIVIVGLFSVILEQLTKETEGGNHSSGKSGGFDVKALRAFRVLRPLRLVSGVPSLQVVLNSIIKAMVNDAIGWEWPWVYFVSLIILGSFFVLNLVLGVLSGEFSKEREKAKARGDFQKLREKQQLEEDLKGYLDWITQAEDIDPENEEEGGEEGKRNTSMPTSETESVNTENVSGEGETQGCCGTLCRRWRRWNRFNRRRCRAAVKSVTFYWLVIVLVFLNTLTISSEHYNQPDWLTQIQDIANKVLLALFTCEMLVKMYSLGLQAYFVSLFNRFDCFVVCGGITETILVELELMSPLGVSVFRCVRLLRIFKVTRHWTSLSNLVASLLNSMKSIASLLLLLFLFIIIFSLLGMQLFGGKFNFDETQTKRSTFDNFPQALLTVFQILTGEDWNAVMYDGIMAYGGPSSSGMIVCIYFIILFICGNCILWSHWNYVVTITVSFLLTFSVVVVVTVAAISKLDILLNVFLAIAVDNLADAESLNTAQKEEAEEKERKKIARKESLENKKNNKPEVNQIANSDNKVTIDDYQEDAEDKDPYPPCDVPGIICGREAQKGFQIRVGCHKLINHHIFTNLILVFIMLSSAALAAEDPIRSHSFRNTILGYFDYAFTAIFTVEILLKMTTFGAFLHKGAFCRNYFNLLDMLVVGVSLVSFGIQSSAISVVKILRVLRVLRPLRAINRAKGLKHVVQCVFVAIRTIGNIMIVTTLLQFMFACIGVQLFKGKFYRCTDEAKSNPEECRGLFILYKDGDVDSPVVRERIWQNSDFNFDNVLSAMMALFTVSTFEGWPALLYKAIDSNGENRQCVEYALKARPLRRYIPKNPYQYKFWYVVNSSPFEYMMFVLIMLNTLCLAMQHYEQSKMFNDAMDILNMVFTGVFTVEMVLKVIAFKPKGYFSDAWNTFDSLIVIGSIIDVALSEADNSEESNRISITFFRLFRVMRLVKLLSRGEGIRTLLWTFIKSFQALPYVALLIAMLFFIYAVIGMQMFGKVAMRDNNQINRNNNFQTFPQAVLLLFRCATGEAWQEIMLACLPGKLCDPDSDYNPGEEYTCGSNFAIVYFISFYMLCAFLIINLFVAVIMDNFDYLTRDWSILGPHHLDEFKRIWSEYDPEAKGRIKHLDVVTLLRRIQPPLGFGKLCPHRVACKRLVAMNMPLNSDGTVMFNATLFALVRTALKIKTEGNLEQANEELRAVIKKIWKKTSMKLLDQVVPPAGDDEVTVGKFYATFLIQDYFRKFKKRKEQGLVGKYPAKNTTIALQAGLRTLHDIGPEIRRAISCDLQDDEPEDSKPEEEDVFKVIIPRLAPHWPHGDSGAGKQAPTSTNANLNNANMSKAAHGKPPSIGNLEHVSENGHYSCKHDRELQRRSSIKRSESGDEQFPTICREDPEIHGYFRDPRCLGEQEYFSSEECCEDDSSPTWSRQNYNYYNRYPGSSMDFERPRGYHHPQGFLEDDDSPTGYDSRRSPRRRLLPPTPPSHRRSSFNFECLRRQSSQDDVLPSPALPHRAALPLHLMQQQIMAVAGLDSSKAQKYSPSHSTRSWATPPATPPYRDWSPCYTPLIQVDRSESMDQVNGSLPSLHRSSWYTDEPDISYRTFTPASLTVPSSFRNKNSDKQRSADSLVEAVLISEGLGRYARDPKFVSATKHEIADACDLTIDEMESAASTLLNGSVCPRANGDMGPISHRQDYELQDFGPGYSDEEPDPGREEEDLADEMICITTL

SEQ ID NO: 1147 - DNA, 337022 bp, Homo sapiens
  misc_feature (1)...(337022): n = A,T,C or G
tttggctattctgtcacatcattaaaagtctagtctgtttgtgatgtagtgtgtttgcaaaaactctcccatacaccctggcattctttgttaattgccattaaagtcatgtcaggttttgaaaaattatggtgttcttgacactgttccctttcagcctcacgtgttccttgtatttatcacaatggaacactaacaaatatttattcagttttatagacatgttgacaataaagtctaccatgtgtgtctccctgccatggtgattattttgctcaatatgtgattgactgagatttttcagtgtattataaacacacattaaaaataggaacataaaaaagataaaacagaaaaatggaaagttccatatttctggatgcaataccatgccaacctggttattaggacacgaaacagataatttttagtgagttatctaagtttgtataatgattcttcttcaaataagtagttttggatcccataaccttcctcttcaaaaatttctcgaattagaaccttttaaaaagtactttttcctctgtgtgtttgttccaataacctaggaaatataaagtttggctattttaccaaactttcaaacccacagtccaattccaatttttagcatccattttaaaccataagcatgaagctgcaagaggtcactgcattttcatattgcatttttgtcaaacagaaagagaactactgaagtggctaagtcctctctactgtgttaatcaaagggaatagaggggtggtgcttatttcaaagggtcttattagaaaactgggattacaaaaggtcaatatttttaatgatttcctatttaatgatcctccaaagtcctgtttaacaagcttatgtcagtattaaggatttgtgacttagtgtttttttttttttaagtagtaagaaaggtaaacaggtccacatacatggtaggtgccaagtcggagagacactggtgccatttaaacttcagttttgttttgtgaattaaatatttaaacaactgctctgaagaaacaaaaatgtaactgtaatgtttgaactataaaatttctgacgtttattgactttctggatctccctaacaacttcctgtcctcataaatttgctcctgtggttgattggatgcagatctgtgtgattttttcattgcagtgtgtgactataccagttttatttccggtagctagcttatgcttttaacctggagatagctgtgtagtggtgttgactgaaaccagtgttgtgtggggtgtgtgtatgcctataattacattcagcatgagccatggggctgcatttatgtgcatgtgtgtaaatagctatttcactatgatctctgtcctgctttggggttgtcagcattgattactgaatcttaaatactaaataacagaaattaaaattaagcaaaattcaaagactattaaaaaaaaccactgtgttcagttgctttgggactgtatttgaacgacagaatgcacttaagaaaaaggagagccattacagtggattgtattaggtcggtgcaaaagtaattgcaccgacctaatattttaattgaggtggtgagttaagttctaaagtcaggacataaaggtaaaaactaagaccaatcaaaggaaggacagactcctgccagcaccacttaagtggctccctccgtccctctgtaactgagtatatttaaattcacatgagttatatgatttaacttgatggtatgtgtcagaagctctgaaacagtattttaaatgtttgcaatacataaacaagatgggtgatattatccctgttttaaaggtgaggaaactgaggccctaagagggtaagtgacatcccccaaacaacatagctagtagctggcagagccaggatttgggcccagttctatgtgtctccaaagtctaggctctccagtacgccatcctagaatgtgaagaactcttagggatcatgttatataaccagtttatttcacagatgggaaacttcagacttattccctcctttcagtcagcatggataatggggtgttgactgcatattctagactctgccaggatttcccaactctggaagtggagagtacttggtgcatcagagagtgatggataagatttaagaattgggtcaaaggggatgggaatgaaccagttaaaggaattggaattactttgtctgatgtgaaatgtaaatcctattcttcgagtgaacagtcacttgatgaaggataaagaccagctggactccatgcaatgaggccaaagcaagaagaaaggactttaaattttgctgggtgaggcctaagtcagttgtaatggagaagtcctgatggtggtggggtatggcggtggatggggagagtagcgagttagcaccatggggtaggggacctcactagacagtaagctgccctctgctggcttcctgttttccctgcccaatctcagagtagcgccgcccctcacagtaactaaagaaattcatcaacaaatcttgtattgattaagacaaaaagtgacatcttcttaatggatccatcagacctttctgtgctctacaaatcttttcatcctctgatctaccttgcccactaaggttagagctattttcatgaagtacgactgattccatttctctgctcaaaaatgaaccaaagcagcctgagcagctgttttcaaagtgtggtctatggacccccagaggtaaggtggccaattgtggcaaataaaaatacagaaagcccaaggaaatttcagtttcaaataaacagcttttttttttttttttttttagtgtaagtatgccccatgcaatatttggacatcctgtattttatctggtaaccctacctgggggaccaaaaggccctctctttgaggtcaagactattttcacggtaacattaagacttatttgtcttccctaatgtgttgacattgcactgatggtacaaaatcaacagtgtttaaaactgctggtgtcttagcatgaatcagggcagtgacaccaaagtgtactggtggatgctgccttattctgtcatgcactcactgtaaaaaaaaaaaaaaagccagttttacttaataatctccttgatgaagcagtaaaaataattaactttattaaatcttaatccttgggtagatgtctttttaatattctgagtaacaaattaggacaaatgcataaaacatttctgctgtatatgatttcctcacttgtgtgatggtttgaggtaggaagctgaatggctttttcatggaacaccatttttactgaaaaactatgtttattcagacctaagtatttggcagttattttcttgaaaatgaatgaagtaagcctgttactttaaagaaaatcttgacagtatttgtgccaattacaaaatttcagctttcaagtgaaaattagaattttgaaaaacttctgtctaccacagggagcttgacagtttcccaatacttaaagactttctgatgagattggtggtgataacaatgaatgtggctttttgatattgtataatgaaacgtgtcaacatttggaaaacctgtgtaactcagtgaaccaggattttccaaatgaccaatgcataatgttaccaaatcatgcatgggtaaaagatccattcaaactgtgaaatagactgatagaatttaatgtaacattgtagaaagtttcactgacatggtttgaaataacacatttcaactaacttttaaaagtcaagttttggtgtcatggcaaagaataatatccacgattatctgaaaaggcgattaaaacagtcctcctatttccagctatatacctgtgtgaggctgaatactcttcacatacttcagtccaaacattctatcactactgattgaatgcaggagcacaaaggagaatccagctgtcttcagccagacagtgaagagatttgcaaacaataagaacaccactcttctcaccattttgttctggaaaacagttacttttcatttttaaaagtatgttagaacacgtaatgggcttgtgactattttcaagtgaattataaatgatttaaaaaatgttctaagccgagtgcagtggctcatccctgtaaccccagcactttgggaggctgaggcaggagaatcatttgacaaagcgagacccccatctctacaaaaaaattttaaaaaaggttgcagtgagctgtgactgtgccactacactccagcctgggtgacagtgagaccctgtctctgaaaaacaaaaacagaaacaaaaagctctttataattgttaggagtctaaagaggtctgagatttaaaaaaaaaaaaaaatcagaactgctggggcagggtaacacctagactgctgagccagacactagggacctgacactacttactctgtgctgcctttgcaatcttccttatcaccactatctcttaagtccccctaggtcccagcctaaccatttacttattaatttctgcatgtactctggacttctcagcctgactttgtgcatcccattcattcctctacctggaacacatgtccccacccgcttaatccgcctgttctggtggttagtgggtcagggctatcccctcttagcaccagggcctgtggatggaggaactcattcaaacccaactacacagtttgtttaaggatatgttctgcatatagccttcaggttctgtttatcttccttaattagaattcctggtgtgcaaaggacccaattttccctctgttttatatttttaccatctaagggccaagtgtgctaccataaactttatgggatttttgtaaatatcagctgacaatttctggtgatctatgtgggcttttatgatcctgtgcagactaatcagagtatttagtgcccgctgtgagcataacacttagcagcagggagagggggttaaggaggtgatccttgcttaaggacccacacggtggttggagagacaggatttatagccaagaagcaatcacacaagacacaagaatgtatgtcatcaaaggggaagccaggtgctgcaggcctttagggaaggggaggtgggggtgggggcacacgagtgtccatagcagcagtagcaatcagagaagtcttctggaggaggcagagacttgaccgaggctttttcaatggagaggggttagtgagaggtcagcaagtcaacaaggtagggattcctggtcagcgaataaacaggagccaaagcagagagtcagaaatgagcacagcatgttcacagtctaatgagactgctgaccacagtttaaagtgaatggtgcgagatgataaggttgaacgctagtcagaggagtttaggttgaatgtggaaggaaggaggaagaaaacattttttggtcagggaagtgacatggtgtgttttgaacaagatggattatttgtgggaggaaaaatggagaatgggcatcttgtgcatgacctggggtgtgagatggtgaggttctggactgggccatcagcaaggttttttgaaatgcagtgcacgcaggtaatcatgtctggcatgccagctcagtgcgttcaagtgggagtgctttataaataaggtcatggagattaagaccccacaatagtgtgttagcaacataattgggttgtagcacatgtagctgatttagagctgaaatcttttgttttagcctttcctcatgtcttgttggctcagctactaagtaattgtgtgtggttttgggcgagctacttaactcctcagtgtcttggttttgttgtctgtaaaatgagttttgtttttttttttttttagagttttgctccgttgcccaagctggagtgcagtggcacaatctctgctcactgcaacctccacctcccaggttgaagtgattcttctgcctcagccacccacgtagctgggacttaaggcgcacgccaccatccccagctaatttttgtaattttagtagagatggggtttcaccatgttggccaggctggtctcaaattcatggactcaagcccgccttggccttccaaagtgctgggattataggcatgagccactgagcctggccaaaatgagggttttatagtacctcgtaggcttgttacgagaattaaatgagttagtacatataaagtgcctaccctagaacctggcacacaggaagcctttaaaagatcttattatttatttattcagtagtttgcattatcatgggaatataaatatttaaattacccaatgggccaacgcatctagagctgtgctgaatcaaggccctcaaaaaaaaaaaatgcttgctggagacatcgccaagatgagactcattcagaaactgggatggaatgtcaaaaactccaattcaaggctgagcagtggctcatgcccgtaatcccagcacgctgggaggctgaggcagaactgcttgaagccagggcttgcagcttacagtgaactatgatcacaccactgcactccaatctgggcaacatagtgagaccctgtttctaaaaataattatttaaaaaaaaaacccaaaccctcctgcaataccataaacttgttaagatctaacgcacaaaacctggagaccgaaaccacaatttaatcatgtcacttttgagctaaaacaacttcactggctctcactgccaagaaattgaatctggtcttcttagccagccagccttcctccacagatttgggttggcctttccagcctcctcctcctctagcccagggggtctttgcctcagccacactgtgctcctgctcatttttaaacacacccaccttgcacttcagtctcccctgtgcctttgctcttacccccaaagctcattcctcatacatcatttatgccctgtaaaagtagtcacctgtttttaatagactttattttttttaagagcagttttaggtttacagaaaaattttgcagcaaggacagaattcccatatattctctcccccaacagtttctcctattaacatcttgcattagtgagctacactatatacacagttataacactggtacaccccagtgttataattgatgaaccaatattgtggtactactattaacaaaagtctatagtttgcattagggtttatgctttgtggtgtacagtccaacgggtttttgacaaacgcataatgtcctacgtccatcatggcagtatcataaagaatagcttcactgccctagaattccctgtatgccacctattcatccctctttctcccggtcagtttttaagaatcagttcaaatgccctctcttctgtgaaaacatctcagttccctcagttacaattaatctgtctgatgcttgtatagcgctttttcatacttgttatagctgctatgtttgcatggtatgaaagaagtatacacggccgggcgcgcggtggctcacggctgtaatcccagcactttgggaggccgaggcaggtgtatcacctgaggtcaggagtttgagaccagcctggccaacacggtgaaaccccgtctctactaaaaatacaaaaattacctgagggtggtggcgcgcgcctgtagtcccacctattcaggaggctgaggcaggagaatctctcttgaactcaacaggcagaggttacagtgagctgaaactgcatcactgcattccagcctggacaacagagtgagcaagactccgtctcaaaaaaaaaaaaaagtatacaaacttttcttctgtcattaggttgtccttgaggaaggaactgtgccatagatttgtcctgacatctagaccagacccttattcttaaccggtgccttatgaatgctggctgcactgaactgaacaatgagcaaatatggttcggctcagtcatccactagatacagtatttttccctctagacaggagctgctgtttgcaaatctcccccattccaaatctgagccagcaaaggtatcataaaacaaacttgctcagggaattttgtagaaaaggcctcaagaggcaaggctttagaccaggagttctgaaagtgacatgtgtacttgtgaatttcatacatgctccttggatgggctagtttctttggagggaaccgtcttctattcccttcagattttggatcagaagcagccataggagaggtggcccaggccagctttatattgttactagaccgtagggcgatttctcgcctctccagtctccaaaaacaaagcacaaaaaaggacaagagcctggttgttttcatcctcacggaccagacaccccctcaggaaggcctctggagagtcttctgtctggtccccagtctctctgcccaggtgccccccaacaattgaggatgactagtgtgttctctttgggtaaggagcaccttcccataaacacttatttttcttaattcacgctgagcttttactttattttcgctttaaagtcactgttctgaaacgttctaaaacgccgtaggaacatgcagataggaacaaaagcaaataaatcgaatcctgtgaagtaacaaagcagacgcccttctcctaacaggcagcacaaagctaaatgaaaaatatcagtcatccactagataaagtattttcccctttagacaggagctgccgtttgcaaatctcccccaccctaaatccaagccagcgaaggtatcaaaaaataaactactcccttcagctcccagactggaggcaacagtttcagcagcaccgtctatttccttgaacaacacgagcggtttgaaagaccttggctttgacttccctgtacctgcctccaaacacacgtgggggcggggtggggtggggggagatattgccccccatccccgttgccttccgcgacgccaggccaggcgcagggcaggggagaagatggggggcgccctggattcgcggttccagctgcaggcagttacctggggtagtgagtgctctctacagacccgggctaccccaacccccccgattccagaaagggccggagaaaagcagggggcgcctgccccgctccggagcagccagggagcccggccgagccttgacgaggatgagctcggagaccgcagcagctaccgcccgctagcacctgagctcccagggggcggggcctcctccaggtgtgcgcagaggaaggccggcgcggagtcggggccggcgcgggagcccgagctgtcccccagcccagaaatgcgcggggaggagcggttcatccgcaccccagcgccgcgggagacactggcgccgcctgcctcctccgggtcccggggggagagcgcaccgtgcggcgcggagggggttaaccgggcagcccgccgctggagcgcgcttaaccctttggagcccgcaggtcagccgggccaggctggggtggcggcaccccgagtcccacgcgacggccaccccgagcgcgcaagtggtgccgggcagaaccgcgcgccgggctgcagacccgccggggcgcggcgcgcgcgggccgtgggcggctcggggcgggcggagggcgggggacggcggcgggcgcgcagcgtcgccagggcgaagccggcgtgcggcgcggcgcggcgggcgcagagcgagcgggcgggcgagcgcctccgtccccggatgtgagctccggctgcccgcggtcccgagccagcggcggcgcgggcggcggcggcgggcaccgggcaccgcggcgggcgggcagacgggcgggcatggggggagcgccgagcggccccggcggccgggccggcatcaccgcggcgtctctccgctagaggaggggacaagccagttctcctttgcagcaaaaaattacatgtatatattattaagataatatatacattggattttatttttttaaaaagtttattttgctccatttttgaaaaagagagagcttgggtggcgagcggtttttttttaaaatcaattatccttattttctgttatttgtccccgtccctccccacccccctgctgaagcgagaataagggcagggaccgcggctcctacctcttggtgatccccttccccattccgcccccgccccaacgcccagcacagtgccctgcacacagtagtcgctcaataaatgttcgtggatgatgatgatgatgatgatgaaaaaaatgcagcatcaacggcagcagcaagcggaccacgcgaacggtgagcagccagagcccgggcacccgctgccaaatccgatcctgtcatggtcctccagccccctcccccttccccgcggcgctggatgggttgagggggttggagagggtgctgccagctcggtgtcgtctacacagagaggggacatgcgtgacagccactccgcgctcccctccaggccctgaatgtcagagttaattctgcatttgtggggtgggggcggccgtggagtgtgtggagcgcggtgcagccggaggggcggcgagtcggggtgattcgggttcagtgtcctcgggctcaactttccttcaacgcccccgagcgatggcaggagggccgcaagtcttcagccggagcccccttgccagcctcttctcgccttccactcctcccccgccccctcgttgactaggaagaaggtccctggtggcatccggaaaattctaggattgcccggtttcgccctccgcgccggtgggtgaagcacacccatcccctcgcgggggaggcccggcctcggtatcggggaaaggggttcgggtggagcgtgcgttcccgctcccgtcgccggctgtgcacacgtcggtaacctagcaatgcccggggagccgctgccgctgtggggctcccctccccagctctggcccgggcaccacgtgcagcttccacgccggccggggctgggtcgagggaggatggagcagctcctggccagccctcccctttggagaccgccagtgccccccaacccctgtcggctggaagcctttccgggtgagcgctcccctagggagaagcttgacatgactcgactcgtccccgctccgattgcccgccgctcgcccgctttgccctcttctcaggctttcagacccgtgcttgctttgactctttacttagcaataattggctttgcaaacgcccatctctctaccttgctgtcacctctctcacttctgcttcagtgaggagactgtggcggaaggcggcaggtgcctgggagatctgcctgggagatggcctgacccaaagctggcgggggcttcgcatagggagcctccttgagtttctgccttgtgtgcacctggataccaacctacacggagataattccctcttaggcctggaggcccctggcataatccagtcagtctatcctaggtgtaggggtgcaggctgactgccttgtctgtctctctggatgctggcttggctgatgctgctgcaatttaaaatgcaaaaaagccctaaagatgttttctgttttcggaagcctgtggaggaaatgagtcccaagcatcatgaattttcatttgcaggaagtgtcagtgcataatctagatatttgttatggggtttttggtattgcctgggtgcctatggaagattttttttcggtactgaaaaaaatgcatttgtggctgtggaaagatgttggagtaacactctgaaaatgattaagactattgaattattggtactgcctttttttttccccttggtgatggtggtagttatgttagagaaaagctgttgtatgtatctgttactcattagagatagatgggttttacaaatcagagatgcggagtaaatgtgggaatgacctcagttttgtcagaagaaatgcactaaaagaccctttgtgaagacatgatgtgaaggagtactaaccccactgggtgtgatgcagcggtgatcctgtgtgattgacactgagaccagagctcgtggacttttcttgactctccagctgactaaagcccagcttgtgaaaaatagcacatgagattcaaaatggaaacataggagtgaatgattcccctgttattgatgggagacaacctttgatttttttctcctacccactggatcctcatttaaaaaaaaaaatctttgtttttctccttctccccagaggcaaactatgcaagaggcaccagacttcctctttctggtgaaggaccaacttctcagccgaatagctccaagcaaactgtcctgtcttggcaagctgcaatcgatgctgctagacaggccaaggctgcccaaactatgagcacctctgcacccccacctgtaggatctctctcccaaagaaaacgtcagcaatacgccaagagcaaaaaacagggtaactcgtccaacagccgacctgcccgcgcccttttctgtttatcactcaataaccccatccgaagagcctgcattagtatagtggaatggaagtatcctttttttgggggaagtctttctcattttctcttttaccatctgttttttaaaaggatttgctttctgaagtgacacaaagctgtagcagtctggaatgcgagtaacagaagttgtatataaggggtttcattgtatataccttcctgtctcttcgggttgcagaggggtggctgtacgggtatatttagcccactgtctggatgtgtgtatagtagtagtagtagggggagggagtgacagcctgaaacttcacaggggcagataattaaaatgtgaaaccaacctttggttattggacattagatggttagttttaaattcagtgttgtctttgggcaatagcatgcattgaacctattgcaaacaaggtatacagattagaaaaaaagactgtataagactctgtttgaagggaatacatttttgacctttagtagaatcttctcattctgatgtttgaaatttgcttctgcaactacaattaatgctaaggttgcttctagtctgacatttggtgattctaattattcaggtagctgcagatatgagcacatgcttcctagggagagattacttttgattttttttctctgatcagtgctataacttcctggaatttccttttgacaagttccaaagaagcatttggaacgtgagcatgagggagccagtgaagggagaggctcgtgtgtgcctcttcctcctgggcccttatgagttatagaacagccttttcagtggaggaatttgcagttgctgcctttataaaaaattctgtctatgtccttggactggaggtacatttctgggtgtctcctttgtatttttaaaattgaactccaaatgccccagaatggctgtcatgtcccagatcttggaaaacgattgtgcttcagcctgcttaaccccttccctaaatctggaggccaacctccagttactgccactcttcagagaaggttgactgaggccttctttctgagcaaatggctttttaattaggcagatgattcattggtctgggtaaagtaaagcatttcctttccccagaagtgtgtttggaactgtcaggggccttagaacagttcctaactataggaaggggtgtgaatgtaggaattccctccaccaggcccagaaggatggaggggccacaccaaaaagggaggatgttggcagccagctagaaagtggagctgaaatccccttataatttgaggatctagctcggcagctatttgcatgccctctgtctttagctggctattttctgtgctaatggacaggagttaaaatgaggtaactgtctagaaagattttggagagagcagccaaatgctagggtaggatttgaggggttctcatgtgctttttcattttgcagcagatgtcccttctctagagtgagttatggtgtctctcacatagctggggttgtgtgtgtgcattttcttttgaagttctctagtctgagaacgaggagggagctcggtaagccagcatgtggcccagtggcattgctagattcatgacaatggctgtaccttgccaggaagacctcagactggcttgacacgactctgagtaagcagagacctctttgtggggtcactacttttgtgtggagtaggtgggaggcctgatgctgtttctctttgtgcacggtaatgtgtacatagcaatttttgcatgcagagtgaattcctggatcacgctgctgtctcccttttccagttgccagacacatgtgtacaggaattaggggacgtggctgccaattcagggagaagcctgtttacaaatgggacagtttgtaaaatagatagacccttaagcaatatatgatttttttttctctttttttaatgacagtttccttctaattcagggagcaggctatagaaatcctttccaccccgggcagctctgtcaaggccccatccgcagtgggagagcaagggtcaagggtcatttgtttttacagacaggcatgacagagtgtcctgccccctggaggagtgagggatgttctccttatcagaaggaattgttaggatcagacccatctatttctctattgctctgttctgcttcacttgtgaaaatcttatggcagtgagatggtatccacttgtacctggagaccaaaactggaccaacataaagaaaaaaaaatacaacttatatttagtcttcctgaacagtgttagtatttctcagatgtgctggtttatcatttaggtattgggaaattgaaaaggaagaatacctattacttaggtattgggaaattgaaaatgaagaatggaagaaagagggagggaagagactgttgtgtttctatggagaacaacattggggcccttgactttagatttcagtggggacctacaaaaaggaaaaatggaaagggaattctgaagtcttaaggtgggctatctgaaagttggatccctgggtgaaaaagattttataatattagatgagttgagagaaccaatgtgaattaaagctgactggcttaaaaaaaataaacccatcaaaattagtaagggaataatgttattcattgcctttttttcgttgagttatgaaagctcttcgaagatgaaggttttatgaaactcaagatctctccagaggccgggcacagtggctcacgcctgtaattccagcactttgggaggctgaggtgagcagattgcgagtccagaagtgagcagattgcttgagtccaggagttcaagaccagcctgggcaacatggcaaaacccctgtctctactaaaaaaaaaaaaaaaaaaaaaaaaaaaaaattagccggcgtggtggcacatgactgtagttccagctacctgggagactgaggtgggaggatggctggcttgagcctgggaggcggaggttgcagcaagttgagattgcgccagtgcactccagccttggtgacagtgagaccccatctcaaaaaaaaaaaaaaaaaatgatatctctagagaggtaaagagtatttgtttcctgtggcatttttggatttcccagaagtatgtcaggatgaatggagaatagtctgttcgtatgctccagttttaagtaccttgaagtgtttagttaaaccatggccttgcctcttgtgggtgagtgtataggcgaagcactgtggtaaaatcaagcccaggaattgcagatgaggctggtgctcacaaaaccttgtatttggaaaggctgaaaacccaaagaagaaaaacaatcattttggcagatgtcaaattttgtgttgccagttttgacaatgtctcttaataacaccagaatgtttaggtaagtatctcttgaaggctgatctcaaagtgattcttccagacagaccaccaagattgagaaatgttaaagcctactttgaacgtgtctggtgctgatttcttatggctttttaatttaatttgtttacaaattgagcacagtaacagcatattataaactgagctccagtccggctctaatctgaaacagttatagccatcgattcctctagcagagaaagcagaggcgggagctgaagcctggctcgctgctgatcacatctgaggtattggaatatgccatgagaaagttataggtagaatgagaaggtcctggtggcttggcctggcccagtccagacaggcgatttaggctgaccctgccaagaatagcccctgagaaaatggctctaacacatggaggcaaggatctgcggaagacatttatcccatgatgatttctctgtgtctaccacagccgggaacttagtaaggctcttgtcacttttaaacctgtaagaagcagaaacctagttcacacagtgccctaattggatgtacttttaggttttaatatgcagtgtgcagccgaagaatgagtgtaacatgatccttgcaacagaagaaaaggacacggagaggtcatttggtaggaggctccactgtgagatgaccaccgatgattacttctgccgaaaacctagcagtcacagcagtcagccgaaataggatttgtgtatgtcattttccttttaaaagtgctttgaaagtggtgtgatcgggagtgtgatgagggacatggtttatgtttccataacacatatataccttaacacattttttcagaccatttgacatatttatattattggctatttttgccaattgtgtggccttagctatttacatcccattccctgaagatgattctaattcaacaaatcataacttggtaagtgtccttagagttcctgctggtcctggtatatggttatcatttgcttctatacttaaactggcagctggccttctgggtggttgaagtttatagctatgcatgtcgtgtttcttggagctttgcaacagtggttttttgtttgtttgtttgttttaacctgtattctcaaatttatactgactgaaagtatttaaagtcatgaatcttttataaatagatatggaatttttatggaagagatttggagcagattttaaaataactgttatctccacataagtttttgctaccattcttttcctgataatattagcttttttcttttctttttttttttttgtttttaatctagtgttcttgggagtggtgggtactttggtcagttgttctggtaagtagagaattatcgtagactttgtacatgaactatttttagagaagtagaatataacaaaactaataaatctacatagagcataatttggagaataatacatgatattattgaatacatgatataatattaaagtttctactccacgtcctatgaaatgctccaagagaaaatgattgtatggttaaataaatcaggatgcttccatatactttgctgccttcttaaagatttatagtgcacattagcttagtaaaagctttgggaagttctgcagttaaaaaacaggtttccttttatttaactcagctagtccctaaaagtaatcagtcatgaattctttaaacattttttttttttttggcaaaagactttaacatcatggaaccagtggtccatggaacttcctttgggaaaggttgatatagttttttttttaaaaaaaaagcactaaagagtactagactgggactaggatcttgtcccactcacctgtcaactagctgtatttggggtcatttctcatacctttctgcattgctgtgcagccacctggcaattaggaggattgggtaagaagattgctagtatcgtttttacctctgacattctgcaatctttctttgatgattcagaagccatttcaggatttttctggtgctgcagcatccttcttgcaaggattggttctttgcaatcagaagccatgcagaatgggagatgaaggggagcccattctggataacaggaaactctattgtttttcttctcttctcttagctggttccgtttgtttttggcttctcatgttgaagctctattttagcagggctggatgttcctaactgagcgagcgttgtaaaggcaaacacactaggctctcccttgtgtgggagagctctgctggcttctgaagatagtgaaattatgctcttgtgaataagccttaacgatttatgtacaggatttcatgttacatttaaaatgttgtggcacatttcagatgtaatgtgatgtctatttgtatgtgggctttagtagtttgatatctagagaattttctaaaaattttgggaattgatgctgaaaatacaactataaatgggagtcggataaccacataaacactggtagtatatatttggacaatgccagagatcatttgtgtaactttggacattttatgtagcttttgatttctttgtagacatgtgacattagatgattgttttaaagaaaaagcagaagtggtggaaagcctcccatcaatggagatagatcatcgtagtctaggccacagatggtgttagccttgttaccaaatttaacgacgtggatggtgacccagattgttacttttcgtagctcaagagaacatgattaaacaaacttagaaaataaatacctttcagaaaggcagattaattcagatcagtggaataattaatgtagctgcatgtgtaagccaattaatattctgaatttttcccagggaaattcagggcactgatataggcactgtcagaccatttggatttctcagctaagaagtcaggaaataaaatacaggaaatggattaatctttcccttttgcaccccttctccagtgaatcttttcttgactattcttaagctttgaacttttttttttttttgtggggggggatttggcagtgtgttaatttggtgggcctttctaaaagccaacgtatattcctttgacctcttcatatagtattctgaaactcatggcattcaactttgtgtcttgctttcacttgggtggtcacatggccagatgaatttttactctgcttgactctttaaatacttcctttcccactgtgggaagggaagatctttgtggatttccttctgactctaagcaaggtcccatgccatgttggtcctcccatgagggagctggttttttgtttttttttttttaaatacatttgacccaatttgtactagagtgattgctctatttttgggattggtttagaggcagctgaacgaaacttatttttcatctgtagtaaatacctttcatttaatgtgaatggtaaaatcaaagggcagacgctgaaatgagttgcaaggctgcatgtatctggaagctgctggttttctttgcctgatagctccatgggaaagatgcagttgagcgatagagtgagatccagggccagctttatgtatgatgtttctgcctgttaccagttacctagtaaaattatgactttttttggggaagaaacgtggccatccccattgatccaatgtgtctttgttctagatagtatgtaactcagctagttttgggatttggagactaccttggggggcagaagttttcccagggatagtttttgttctttatttttttaaaaatataaacactctcaagtttctctgcagctttcgtttatggacttgcagggctagtggaggctggagtcatggaaacggtgcaactcagttcccacagtaatagccctcctagttcagtcaatagcagtatttcctcagttccacttactgaaagcaaataccattgattttattattattttttttttagcacagaggaggggaatgcctctgtatcaagtgtcagagtggggatgattacaatatcatacttcactgtgatgaaaaatgctttatttcatatcattcagtttcttataagcaaaccgacatggttgaacagttttgagtctgtgtaatctgttcctggtactcttcctcccggtgctacctcttacttctctggagtgtggaactgcttgaaattaaaaatgtccagaatggagatcttcatctgccaagtcagaccttctttgatccctactgatggctgcactcacctctaagccatctctgaaccagcactaagcgcccggaggcaaaggcccatggcccatgtctctctatccccttatctagcaaagtgcctgatgtaccaggtgctttttatttgtttatttgtttttttttttttttttttttgaggctctgttgcccaggctggagtgctgtggtgcaatttcggctcactgcaagctccgcctctggggttcatacctctctcctgcctcagcctcctgagtagctgggactacagacgagcgccaacatgcctggctaatatttttgtatttttagtagagatggggtttcaccgtgttagccaggatggtctcaatctcctgaccttgtgatctgcccgcctcggcctcccaaagtgctggaattacaggcttgagccaccgcgcctggcctatatgcacatctttatcctctggagcgtcttcaaaatacagttaatagtgaagcattctgaatccccagccatgcctgatgcagtggtaggggtatacagtagatgttcagtaaataagtattgctgatgtgcaccaagcgaatgactttcccaggagaagcgccaccatcattccttcctctgagccatgtttcagattttcttgggtggcaggtccctttgtggatttcttgcaggtccttagctgggaatgagtgggaaggtgtacgtgttattcctgaaaagcttagggtctgcggcccttcttgtgcacctctgcttaaaagagcccacagtgttggctttcatagcagagcagtctaggaaattttgtactctggttccagggctcagagtagcaagagtgctgggacctgtctgagaagcagtgctgggctgtggatgcttgcctgtggcaccagatgccttacagtggccaggaatgctgcgggacagtctactttgattgctttctttcctccatggctgagatctgagtgtagtgttaactgggcttaaaaatcaagtccgttgtatctgcatggtcacgtagttcggcatctcatggcttttgcacctagaggtgtgaaccataatacctgaaacacaatttcataacctggctccttgggcttagcctatatggtggaggttaggtctgtatatcatcaagactgtgtctttgcatggttgtcattctgttggaattgaactttcttatttctgtaggcctaggttctgtctattcttctcagacagctcatatgctgcttcttcccttcagccttctctgatacttgtccactccccgcctgcctacatctgagtacttgctttccctctggacacccctgtgcccagtccaactctcctgtacagacaccagcccctttcccctggtttataactgttgtgggaagtggcgtggagtgtgatggtctgctcatgggctgtggggtctgacagcctgactctttggctgattagctgagtgactttggatggaactagaatatgagttcctagaggctgagactgcagtctgatttgggtgtatagccttgtgaacttaatcctgtgcctggcacacaggaagcacatcaggaaatgcacgtcaaatgagtgaataaataaatgaatgaccatacaaggactccatggtatattcttgtagatcattagttaattatcaacaattggctaatgattaatgtttgcctgagaggctgactttttgtccattagtaatgacatcccaggaaacacctggcagagttcgtctttaatttcaggagtatatctttctttcttggcaaatttaactattaaagagagaagaaagacaagtacttgatactttttgaatctgtaagttataaacctgtcttctgtattcaatgttgtatattagccacattgcagatgattctatttggatggatgtgtgactgtcacctttcacataaaaattgattgagccagtcatagtggtatgtgcctgtagtcccagctatgtgggaggctgaggcaggagtcttggttgagcccaggagtttgagactgtaggggactatgagtgagccactgcactctagcctgggtgacagagcaagactctatctcaaaaaaaaaaaaaaaaaaaaacaaaaaaatgtggtagaaggggagagagcctcaaaatgaccagagtagatggactcgtgtagtaaaactttacccaaagttggtttcctaatgatataatgtgaaacagtctatgtgctatacaaataattatatctcttttgttaagccttacgtcattttgacaaaggctttacttgattgagtattgacggcttttccaaaataaaatccagctcttaattgagatttgtggctgggcatggtagctcatgcttgtaatcccagcactttgggacacttagcagggaggattgctggaggccaggagttcaaaaccagaatgggcaacatagtgagattccatgtctccccccgccaaaaaaaaaaaaaaaattagctgggtgtggtggcgtgcacctgtggtcccagctactcaggaggctgaggtggggggattgcttgtgcctgggaggtcaagactatagtgagctgtgattatgttactgtactctagcctgggtgacagaatgagaccctgtctcaaaaataaaggaaaaaaagaagaatttaggttttttactattaaaattccataagaggaattccagtgggggtccttgctcatttggtttgtttttttacaatgtgaatatcattattttatagtcataccttatacaacgaacctccccatctagacccttcactagtgagactaccttagggtgaggatatttgggtatattagagtattagccagaactctttgggttacagattgtgggaatacaactcactcaaattggcttagctgaaaaaaaagtgcgtatgtatgtacaatttataaactcagttaaccaaagagtccactgggtagaaatggcatcagacacagctggaaaggggggggctgaaaagatgtcaccagcattctatccctgccctgcaccctcgggtttctgagccagagtctgactgacctctagtaggtcagcctcacgttgcctatgtgtacatcttcctcagctcattttgaggagggcatgtggggacgtgcatttctttctttttttcaaattttattttattttaagttccgggatacatgtgcaggatgtgcaggtttgttacataggtaaatgcatgccacggtggtttgccgcacctatcaacccatcacctaggtattaagccctgcatgcattagctatttatcctgatgctcttcctcccacatttctttttttttgtttttagcatttattttaggtttgggggtacatgtgaaggtttgttacataggtaaacacaagtcgcacaggtttgttgtacatattatttcatcacccaggtattaagcctagtacccaatagttatcttttctgttcctctctcttcccccaccaccccgcaactcaagtagacccagtgtctgttgtttccctctgtgttcgtaagttcttatcatttagctcccgcttataagtgagagcaaggcatttctttcttaatctcagcttaagttcggcattttaacaatgattgcatcagaaacagagacctctgtagcagattggtgggtagttttctttttttttaaccttcctcattggtgtttgtttactttttaactgtctgacaaatgtgaaaagtacccaatacagggtgacagcatgcccagcagtagagacacttgggtgttaaataccagtggcggtggggacacgccccaacagaccccaacagcttctcaccaaagaaagttcctaaaggaatggaagaggttctagaattctggaggtggggtgtacagggagggaccatgtgcactgttactgttgagtggacagatgtgcagaagggaggggtgtcggcgggtgtccctgccccagcaagggtagagggctggttagcagttgatccaggagtagatgttagcatccccaccatgcagctacaggatgtggtcctcaagtcctgtctgctcatgtgatggaaataaggagagtggtggaggcgggggccttccttttttaattcaggtgagattggtattctcccagctggggttcctgtgggctgtaagggtgtttggctgggcaggcaaagccggaaatgggtggtatggaggaagaaacagaatagctgaagatgggatgaaggaggaactgcctgaactgatcagtgagctccacagccccctctgtgtgtgtgtgtgtgtgtttgagagagtaagagagagctcatgctcatgagtgtgtgagttaggggaaaggtggaggtgggcattgttgacacaggccttgcaggacgaagccttcctttggtggctttaattaagcagggccccagacactgcctgggctggagaaaatgactttcttctccagaacttcaaagcaattatttttgctaattttttccttcctccctgttaggtgagtggtagttttagaaatcacaggacatctgttgaaattattgaatgagtgaacgcgaggtgaggctggagggaatcaggggctgacccgagggagggcggggaggcaggtgcagactgctcagtgagtgtggtgggatcccggtcttggctggccctgtaggagcccagccagggaaggcaggaagaggtggcctaggttagctttgcctggggattcaaaggggccaggcgagaggctcatgctctttctccttccctttccctgccatgctcatcttctgagggctgacgctgaatccttttcctgtgtccgtcagggattcctgcataacatagactcacagatacttttttacagctataagaggacgtatttataagaaaggaaattgaggcagctttattcaacaaatattgattgagacctcctgtgcagagcacagcagccctgtgtttctgccttccagcccgctgctgtggctccccatgccttgttgtgaaggaaaacctacagtgtggggttggaaaacagccagatttgttttcatattttgcattcttactataaatcatcactcaaaattgacacaagtaatacatgaatacattgtttcaaataattaaaacaatacagataaagtaacaaacccctttacctacccaactccttctaattacaatgatcagttccgtgtgtcccttccgaattgtttttcacagcgtgtgtgtacgtatgtatatatcacctgtgcattttgaaacataaatacagtttgagtattttaaatttcgtgcaagtgggaacatgcattctatggcttcctttttcccactcaatagaccttacagacctttccatatctgtatgcagaaatctaacaacttcatagttggtgtaaaatattccatgtatgaatgtaccacagtttatttgttttctttgtgatgaacatttagggtaattccaaaagttttactgtttcaaatcatgctgcattgaatatccttttgtatgcttctttgtgcatgcaagaaaacgtttgtctgggatgacaactcagaagtaaactctccgggttggagggtatgtgcgtttttaatatccatgtttattgccacatcattcttcactaagcctgtactcttttacctcacaccacatctcactgcctcagcagtcatttcactctgcagagtgacctcatgtgttctgtatcttaggctgtacaaaaggaagtcttgggggttgggtctggcctctctctgggatgttagtagcatctggagcatctggttagagtagaaagtccacaaacctgagccctagattttaggaatctattttgcaccagtgaccagataaaaggcaccaaaacttattcttgtctcccttgctttcagtcccaggtgcttagatactattgtttcttttgagtgaaatattcattccaggtagctaataggtaaataagttcctaatacaaaaactgagtcttattttggaacgtttgcttgctacggactggtttcatgacaaatactgcctttatgtccctgttagttggggaagaagaatatccaatccggtatgtctctgatgtcccgtgttcttattatctgttttattttcacacacagtaaaatctcgctattattatggtgtttagggtttgtgcccttcttatttccgaaatctctgaggtggtttagaaaatagaatttgatgaaagtgggacaatggggaatggaagcaaagtctacttgccagggtgctcgaggggaactgattgctgacacctggacatggaattggcctcaaggtttcccagcagcggcggcgaaaaagagtacatcctgacacacagggtttttatcctttcgacaaagggaagcagccacgctcattcacagcagcactttctaggaagcacatccaaggaggaatctccagcgcaggtccttgtgtaaggtacattgttggagcacaatgagccatgtcttcgccgtgcttttgtcggggtcagaaatgccgcgcaagcagatggtccctgcattcatgtttttcaggggtcagggtacgacattaaactgtggtataatgaaaatggaagtacttctcatttctataaaaacgctgctttttgattatataaattagtataggatgaaagctgggaagatgaaaaaagagtagtttaacatagccattatttaatcattcataaagtactttttaaagcatttattacgggtaaaatatagtcccattagacacattccctctttgtgctaacttggtttaactcaaaatacaaagggatacaggaatttatgcaaagaacatcctcccctgcccccgtaaaaccatatttgaatatatgtggttttattattttactctaatgtaatttaaataaatgaccaatatttttaaaaataagaaatccttgaatattcttcagtaaatagataacaacagggtataatgaaacactgtttatatttaaatgactgctttgaaacggtgtgaaagcagcttaaatgggtaaaatgctgcccttttatgtcagtaattagccccttggtcttttttcacgataatgcaaaattgtacttctctgtaggcttacacaaattctgaattattgaaatataaattaatggtgaatctttctaaagctcttttcagaatttttatctggtgggagtgaaattaaaacatccaaaattctaaattagaatgtggcaaagtagagacagccagctagaatttggtaaaagacaggtgtttaataaatcttttcctagacatccatgggttggtactagtgtggtggggtagagaaagctttggcgtgttttaggttggccaaatgaatcagttaattgatgttattaaagccaggtgggacaatagtaggttagaccgcctggttttgattgaccctgaatgaggaatcacagacatgatgaggttgggattggagaggacatcagaaacctccatatgggtctgttcctttttcagacccgccagcatgacctgccctgggttacacagtgagagacgaaccgcatggggatgtagggcagagcatctgtctcccaatctgttttcttcctacccacctcagttacaactatgactccaggttgaagttgggcatctcctatctgaccaagggacagggtctaagaacagcaggggcagtgatgacaaaagattgtctctttaaagcaagctgggcattgagtcaacttttcattatctcttcaattattttctttgtgtagtattaggtcggtgcaaacctaatgacggtttttgccataatacatcttccgaaagatagtttccatcacctctccctcccctgcttaatttcataaaatactttattgctttcttcatacataccaacctgtagaaatcatttgaccatagattgccacatttattttatggaaatagccagggcacaggccagcggatgtagtagggcaggagagaatcagcagagctggctaacaaatgcagtgggtctttcctcagtttcttgtttttgtgtggttagcttgccctgtctttctgactataactggaggcacagtggttattgcctttgttactagctgacattggctgacattgctgagctaggtgggctttctatatagggtcctgtgctgaataacagtgtttcagttcatcagccaagatcaaagtcggtggtcccataagattataatggagctaaaaaattcttgttgcctagtgacatcgtagtcattgtgcctttgtaacattgtagcacaattactttattttaaaaataaatttggtagccaggcgtgcctcacacctgtaatcctagcactttgggaggacgaggtgggcagattgcttgagttcaggagttcgagaccagctggtgaaacctcgtctctaccaaaaatacaaaaaaattagctgggcgtggtggcacacgcctgtgattgcagctactcaggaggctgaggtgggagaatcacttgagcctgggtgatggagattgcagtaagccgagattgtgccactttattccatcctaggtgactgagaccccgtctgaaaaaataaaaataagtaaattcaatgtagtctgagtgtacggtatttataaagtgtatggtagtgtaggctttcacattcactcatcactactgactcactcagagcaacttccagtcctgcaagctccattcatggtgagtgccctctacaggtgtactgtattttggcttttatacagtatttttactgtaccttttgtatatttagatacaactggtgttataattgcctatagtattcagcacagtcacatgctgtacaggtttgtggcctagcagcaacaggcgatcccatataacctaggtatgtagtaggtggtaccatctaggtctgtgtaagtacactccgtgttcacacagtgatgaaattgcctaacaatgcacttttcaggaccctgttgtttatacctgttgttaagctatgcatgactgtaatctcctctaattcccatttaatctttaccataaacccacaagggagatactgttaaaaaaatcctcattttacaggtgaggaaacaaggctagaaatggttatattgcttgcacgaggccgtgctcctggtaattggcagggccaggattcacacccggacttctgactcaagcgcccacgctcaagtactaggccatgaaagggagtccaggctcacaggctgatgatgcctaaacaccaagcggaggagggtatgaccaaagggcagagccagagaggagaccatgggggagctgacggcagaaccttttgggggcgtggggggtgggggtctctctggctaggcttcacattcatgcttttgattagtgattggaaccaaggtctggggactggcatagaaactttccaggttaggattcagtcccagctttgcctttcactggctctgtgactgggtcaagccctttctgcatctgctctttctctgtggaagaggaaataaaatggctaaaggtgttatcacaggccctggctcctagaaagcactgtgctgtgagccagaggtttaagatgggcttcagcctcacagcagtcctgtgaggtaggtgtcgttagccttagctgtagatgaagaaactgaggcttgggaagaccagccggcttgctctggggcacctggtgaagagctggctggatggaggattggatagtgatgggtccctcctgccatactagaagagcttcctggacagtttgcttggattggagtttaatttctaaagccatttttttaggtgttcttaccagactgagctagtgcatctgtcccaccgaatagcctaagactttagtggtcatagagggttttgcagcggatctggtgaagaaatgaactgaaaatgagcctgctggccataggagggcctagacctggaccataccccatcatcatttagacaataaagggtggttaattcccttggaacaccaaggacagagagggggctagtttaatggtcaggatctgattctgctgcagctagaagactgaagcctgcctctacatggtggtccggggtaaaaagttcaaagctcagcacactacccacaaggcttggtggtttctttacgtgtgactttctcagccgacttgaaatccaccaggtgtctcttgttctctgcttggcccaggtgggagcccctgattgtctcttgacttaaatgttgctcagaagaggaaataaagcaggagctaaggagcacaacgatgtcagggggattctggcccgatggtcgtgcagttcctagatttggagtcgtgaaaacaatcactaacacctgcgtggtcagggacggcctatacggcacttcatcatagggtctgatttttatcctcacagcagccttgtgaacattgctgatatttgacacaccaggcagccaaggtgtggggcagttgaatgacttgcccaagagcaaacagcaagtaagcagcagaattaggatgtggacctctcctgccctttctgccacactgtgttcctcgtgtcatggagtcctccctgcaggtcactcgggtaagagaccaaggctcacagatgggagctggcttgccagagctagggctcctcaggacccaggtgatgggcttgcttctctgacatgtggtccctgacctctgttttctcacctgtaagatggggatcatagcattattaatagtcatgttgttgagaggattaaaggcgattttgcaagggaaccctctgtgaacaacagatgctggcccattgatttccttgtgcatctagtcccactttctcaggcatttaggctctgccctgctctggctctctctctcttcagccttccaccgtatcaggagagtggagactctggaggaagacagatcttggtttggtttctaggtttgatgctgactgactgggtttgggaatgaacaaatgatctcacctcccttggtctggcttcctcatctgtaaaacagagataataattctcatctcacttttcatgtgggatctttgtgaggagtcaatacaaataatgtgcgagggagctctcatttaccagaaggcattagttaactggtcaagaatagttcaagagagtcttacctcccagtgaagtttaaggtttggcagtatctgagcactgggggaatcttttcctataccccccttgaagtgccatagggttttgagaatcagtcacacggcacacctgttaaatccctgtgttcttccatgattgctgcctttctttgccttatgattttttcccttattgtggcctagtccacggaggttggaaagaggagtgtgcccttcccttcccttccctttcctcagcaaggggctagtttctactcatagctcagggctcacccacagcatagcgctgtgtggaagcctggtgggggcactgggtgagtggtgctgcagcagaaaggcctcctgctgagacgctgaggtcagcattttcagcggcagggagccctgtgactgaaagcagaaagaccaagtacagtgtgaggactcgggttggtgtttgtggccacattgatggcttcatggaagtatgttcccctctgtgcaatgaactagtagggcctgtgtcttggggcctgcaccttttgattgcaggcaccaggcccagcattttttctgtgttgcctatctggacgacaagccatacggtagttactagcgtccccattttgcaggtgaggcagatgaagctaggaggcgttaacttaaatgactctttgctgagggaataaacccataagatgacaaatgaggtctgtggtcactttcttcactgttgcagtgctgtgcccagcactgagtgtgagggatgtcatggagagaatgctgaatttggagtccggtggcctggctttgagtccctgctctgtaactttacttcgttgtgaccctcactttcttcattggtcataaagcaggaggtaaaaatttaaatgagatctgtgtgaaagcgttttataatctacgaagctatatacacatgggcggcatcatccttatggctgtctgttgagagagggcctcgaggagaggacttggcttcatcttgccttctaatccctcactgcaaggccctgaatcctaatccctcactgcaaggccctgaatcctaattccactccatctctccatgatgccagtgccacatctgggacctacgcagaagagtcatacctgccagcacagctatggtgattgtgcttgggaagaagttgaagttgcagaaggaaggtggtagagagggactgaaagagccaaccaggccagagctcgacaggaccctccctccttccctacccttcagacaggagctgcatcaccattttcttttccttttctttctttctttttttttttttttagacagagtctcactctgtcacccaggctggagtgcagtggcagtatcttggctcactgcaacctctgcctcccaggttcaagcgattcttctgcctcagcctcctgagtagctggggctacaggcgtgcgccaccacacccagctaatttttgtatttttagtagagacggggtttcaccatattggccaggctggtctcaaactcctgaccttgtgatccacccatctcagcctcccaaagtgctgggattacaggcatgagccaccgtgcccggccatgcatcacgattttcaaaggccagcttcctgactgttccttgaactccttgagataggtatttactgtgcttgtgacatgcaaactgcaaataattcttgcctcataatggataggcctgtaacccagccagccctctaggcaagcaaatgttatttcctagttttaagtgtgagcttaatatgtgaattaatttcacatcttcatcctcttcctaaatctgtctttgttttgtctgatgaataactgaagtaatggatttggtcacaccactagctgggtagccacctgaggctggagttctgatatgtgggtcttgcctgctttctctgcactgtggctttgcacgtcgggtgctgaagctggggagctggaatcagctggtgtgttctctgtagaactgagaggactagcaccctggggtggaagcagccctgccttctgaaccacagacttgcttgtgtttgatcttatgctgttttcttactatttctgataagaatgtgaactccttgtgagcagggacccagtgtcccatttctcttaaatcctctacagctgctggcatgggatgtttggtaaataatagaccatttaatgaagcatcactctgtctgtaccaggcaccttgaagttgctttgattgctttgcctgttttcctaataggtgtccggtggtctctctttccaatgcaggaacagagtgctggaggtagagactgtgattgcttaatgaagatatcagaacttgcacaacccacacatagggctcccatcaaagcagtagttctagggctgcaacctcttcccaaagatgttgcaacacttgtcttcagagccagtttctgcttttcattttcctttgcttctggctaaaaatgggatcctgttgtcactgaccttactccccgtcttttctttaagaaactcttgagtatttgtaagaaaatcaaatctatcttcaaataaccaagttttcttatctttgagaatcttgagtgcaatgtgtcatgggctctgaaggtcttacgttgaggaatggcaatattatcagaattacgtgtccagcttcccaagcttactactttgaaggaacacatatttacacaattctgatgtgtttattaaacaaacagctttaccacttcgcagtcacgcttctctaagtctgcagtctcgtctggcctgactttctccttgtgccaagaattccttcaccttttctctttagcctttggccccaggaaaatgggaaagtaagatattttactcctggccaatgcctgatttttagaagccttcctcactccctggcaaggcacattttcctgttacctcagagtaaagagactcggttctggggttctgcatagtgatgctacatgcctgacccttgctagggtttgagggtccttgggaactgatgcaatcgtagaagtcacagctgtcattcaggttatttacagaagtagacagaattgcttcacttgccagcagggcgtcttgagcttgactcagaaggatatgtaagtttctgctttttttttcttgcctgtttcaaaaacgcatttttgataccaggaaagttagacaatttaatcttatctgtagcagagggagcttcatccttgctgtgtgaagctgtgcgagacgacaaagactgttgtagaaagaggcctcttgcttataattgaagcatctttgacctgagtcagtgttctgcagccaggatcagataatcagcactggtcactggcacctggcattgggacctggaggcaaagaataacagaattaattggtttccagtaagtagcagggatcatggcatgttcatactttttaaaagaagccttattgagattgagatataattcacacaccctatacttaactaatttaaatcatacaattcagtgttttttactatattcactgttaagcaaccatcatcaaaatcaactttagaacattttcatcacccaaagaaaccccatacctattagctgtcaccccattttccattctattccccctccctagccccagccctaggcaattgctaatctgctttctgtctgtggatttacctattctgaatatttcatataaacgggatcatacaatatgtgtcctttttgcctggcttagcataatgttttcaaggttgattcatactatcgtgtgtatcactacttcattcctttttatggtagaataatcgtccactaaagggacataccacatttatttatctcttcatcaactgatgaacatttgagtgttttcccctttttggctattatgaataatgttgctgtgaacattcatgtgcaagtattttgtgaacttaagttttcaattctcttggctatattcctgggagtggaattgctaggtcatatggtaactttcccattttgagggactgccaagctgcttgccaaagcagctgcgccattttacattaccaccagcaacatgtggaggttccaatttctgtacgtctttgctaacacttgttattgtctatctttttaattatagccatcatagtgcatatgaagtggtatctcattgtagttttgatttgcatttctctgatgactaataatagtgagcatcttttcatgtgcttattagccgtttgtatcaaatcctttgctcatttttaaattgaatttttaaaattattggtttgtggcagggcatggtggctcatgcctgtaatcccagcactttgggaggccaaggcgggtcggtcacctgaggccaggagttcgagaccagcctggccagcatggtgaaaccctgtctctactaaaaatacaaaaaatagtcagacatggtcacaggcatctgtagtcccagctacttgggaggttcaagccggagaatcgcttgaacccaggaggtggaggttgcagtgagcctagatcatgccactgcactccagcctgggcaacagagtgagactcaatctcaaaaaaaaaaaaattattggtttataagacttcttcatatattctgtataccagttcctttttggatttatgatttgcaaactcctttctttctttctttctttctttctttctttctttctttctttcttttcttttcttttcttttctttttctttcttttctttctttctcctttcctttcctcctgtcctttcctctctccctttctctttcttttccttttctttctttcttctttttttctttctttccttttttcctctctctctttccctatttctttctcttttcttcaggcttttgccctgctggccatactggagtacagtggtatcatcatagctcactgcaactttgaactcctgggctcaagcaatcctcctgcctcagcttcctgagtagctaggattacaggtgtgtgccacccaacctgtgctaatttttaaaaatttttgtagagatgggggtcctgctacgttgcccaaactggtcttgaaatcctggcctcaagcgattccctgcctcagcttcctaaagcattggtgttccaggcatgagctactcactgctggcctcttcaatttcttgatggtatccttcaagcacaaaagtttttacttttgatgacgcgtaatatacattgttagaaggccatagctggattgagtcttcaaggttgcctgttccaactcccttgtcggagtaacgggaggcactgtgatcagagaggaggggcctttctgagggtcacagacccacaaaaccaggactggagtataagtctctggactttcaccttgggacattctcagtttccaccccactgtttctgagggtcgaaaggtttgggtgtatatgtagggaaagataattggtaggctctgaagcacacagttcatttgtttttcaataaggaagagtcatgttagaaattttgtcctttcttccagaaggtacactatatagcctggagccacactgtccaaaatggtagtcactggccacatgtcattataagaacttaaactaattaaaattaaatgaaatttaagattctcagtcataaagctgtattttggctaagcattgtgacttatgcccataatcccagtattttgagaggctgaggcaggattgcttgaggccatgagttggagaacagcctggaaaacatagtgagaccccatctctaccaaaaaaaaaaaaaaaagaaattagccaggcatggtggtgtgtgcttgtagtcctagctagctacccaggaggctgaggtaggaggattgcttcagcccaggagttcaaagttgcagtgatttgtgatcatgccactgcactctagcctgagtgacagagcgagaagctgggggaaaaaaaaccacatttccattgttccttatttatatatggccaccgtattagacgacatatgggttgtttccatgattgcagccagtcctgttgggcagcactggctatacccactggcattctgtccactcctgacccagtggtgccctagacacccagctgtgatctgtcttctgtgggtccctcatctacctgctgctcaggcttcttctttatgtagttgcctctgggcttcctagcaagccccctacccagactagatggtctgtgggccctgcaggcagagacacttcttctgcatagtttttggatgtggttgccagtataaaggctagtgcctttcctcacctcagccaataggtgtgacttgcagaaatagagctgaaagatgcttgcaagaagtgtgttctttcttggagaggttagctcctaaaagtgaatgctgaatgagtggatgaattgatctactctttggactaggggaagatgttgaagaattttttatcgaaaattttattgatatgtaataattgtacatatgtatggggtacatgtgctattttgatacatgcctgtaaggtgtaatgatcatagtgggtaattagggtatccgccacctcaaacactatttctttgtgttgggaacatttcaaatcttctattttgaaatatacaataaattattaactattagtcaccctactgtgctatcaaacactagagcttatttcttccatctaactgtgtgtttgacccattaaccaacctctcttcatccccctccagcccctcttctcagcctctgataactattattctactccctgtctccatgagatcagcttttttagttcccacataagagtgagaacatgcgatatttttctttctgtgcctggcttatttcacttaccgtgatggaagttggagtactctcgagtttagttcttttggctgcattggttggtggtgttttgggtgggtacttcattttagaggcagtcagttccaagaatttgcaagatgctgagtgaagtggggcaagaggcaggagttggaacactgggtgttctgagacagtgacatgagggagatgggtgtagtcctgctgggtgccctgtgtagaggtttcctttatttcaggttcctgtaaccctgagggccatctgagccatcaatccaaggtcaacaggctatggaaaaaatctcaaaactgctctatgtaaaaggatgttttacccacatcttagtgatgggagatactgtagtttggaccaagctaggatattatagaccagaaatgagtctggggactatctcagacatgagaaaggattgaccaagaatcatagcaaattcacagtggcacaactgagactggcatccagggcctctggcgcttcgccataggcacattccaagtgccatggtgtatgtcttcatttacacaaggacaggtacttcatacacacaaacaagcaaagcaacttcttggagacattgcccaggcttagattttaatttatttaacccacgttaggcactcagtcctgccttcaggcccccctttgccactctcataattagaaggtattaagaaacctttcaattacggcaagatcaccagggttctcatttctttttcttatctccagcctatctctagaatctattttttgcagggaggactgtccttgactttaaagaaagcattcagaaacaaagagacttgttatttttgaggtcagcctcctccaccagactctgagagccttgagggcaaggacagtgttgtctcttatcactactcaaggactggtgcagagtgttcatttggtgaatatctgtaaaattctcatttttaggagaactcccttttgctgggcttctcaggtatgaggtcccttttccatatggtcctgaaactttatcaattccagtttagaagtagcgacctgaggaaatggaataattcttctgtccatggtgaggggaggatggggggaaggtgctcattttgcctttgaacttgataagagcagagaacagtcaggtttgtgctgagaatgtaagggttactttttcctgaattgggcagtgggtggatggagcccaacaggacatcctgggaaggattcccagagcagggagagggcaagcacagaattgtggaaggaattccgtgccataaacacagaatatcttatttaacagtggaacttttttgctgtcttctttagaggtggaaaacagttctttccaaagacaagcttaatgactgctgtgccaacacacaaaactacaagatacatttaagcatcagtttagcaccagaaatgcagtttacagaagatttgcatgaaaatcttaaaaacaggttgaaaatgtcctaggctcagctagtgcacttttaagttagtaggaacagggctctagggatgagatgatggagcagggatgtgacataggtcaggggtacatgtgtacctggcctttgaagcctcttttggggttcattttaattaatttcttgttcagcttttaccatgggcctaagtttctctggttggagcagagtaagttttcaggctgaatttcttggatcattgcctttgttttctttttcacatagcctgtggatgtctggccttttcagccaaggaaagaaaatggaaatggttttaaacactcactcacttgagccatgaatttcaaccatatattaattttgcttatttttggattttcaaatcttctgagaagcaatgaaatgacacaggggcaggccactagggtgctttggaggttctgcgtggcctggagcagtggggagaggctcgggagagtggaactgtgccctcccactcgtgctacccacacagcagcctcctccctcactctctccttcatgtatgtgtgtttgaggttctgcttagcactttatttggggaaaataagttttctgaaaacttattttgtaggcaatagaggagagattggtgtatgtcttatccttactcgagttggcaaggactctgggccgaatatttagggcttggctcttgctccctctacctaggtggattatgcagtgagatctcacttgcctttaactcatagttattgcttagctcttaggagcagtagaagtaaaaatcctggtatcgtaaatgagcacaatccctgtaataagtgatttctgtgtattattggtagcttgaaaaatattaagtgttacctccattttttaaatatgaaataaagggctagatcaggacatgaactcattcctgttgtcttccagagctattttactaaggaggagatgacccagtggtgaagagtaggtagcagcatgtcaaacctggtagctttgcagtaggggaggtgggcagtacagtgggaataagctagaactaataattcagtgatcatatggggccttgcaggtttttgttattttctgcttgggtgtaggttttgctttgcaaagtctgaaggtgacctatataattcccatatatttggagctctcaggatgtgccaaggatcagcccaattctctgaacgttaactgagggagtcaggagtccttcctgacctcaagaagctcacagttcagttggggatagatggccttgagcttgtgttttagagctctggtcccaggtagtgagctcaaacccagcacagactagattaagccaaagaggaatttattggctcacattgctggccagtccagggataaactggagtcagctcaggcgctcaaatgatgtcaccaggatctggtttctctctctccagcctggctccacttcctgtatgttgattccattctcaagaattctcagacacgacctccccttgtaattgcaggatggctgccaacagtttctaggcctacgcctttccaccttccagcaaaagagagtgtgagagtctttgtcccagtccttccagatggagtcttgtttcttcccattgtctcagattgggtcacgcgcacatccggaaccagttgcaaggccagggacgtgtgcagcactgctgacgtggggccaggtcatgtgcgtcacccctcgacctggggaggagccaactctaccctaagttcctgggctaagaatggaaagagagtcaagtattggttattggggaaaggtaatgatgtaggcttgaactctggcctgacccattgtcaggacagcctgaacttggggctgtattcccacctgacatagccttaagtcagaatttattccagtatgagtacagcatcttgttaccatgtggttttagctgcactgtggatttagacaccaaatcttgtcttccctgagaacattgtccttcctagaggtggggtggaaaacttatttcaggtaagcattcggaccttgaccctaaccttaatggtgattactgttcgaggtttttcaaacacatagtgaataaggacagctggtgcaatggcacgccctccaattggctacgttacacagataaacattcttaatctttctgaggttttgtatagaagagtggagaattgtaccaacttttctccccccggttgtacatcttcactttgtcaccaagcctggattcctcatctgtaaaatagtatcccctcagagttgctatgagaaataaatgaagtgatttgagtaaggcatggcacctggaacatagtacatcgtgcataagaagcagctattgttattatctcctaatttgtcaaatgagcagggcgtattgccagataagctctttaaagttttaatgttcacattctataaatctaggaaaatctttcctccactgcccacccacacttggattttgagaactgcatcttcattgagggtaacgtgttagaaagctctcaaacattatagccctcacagaatgtatagtacttcataattcaccaagtactttcgtgtccattctctcattcaatcctagaacaatctatgatgaaacaaagcaggtatcacaattcctgttttatagatcagaaaacttagggcttagagagatcaaatgacttacccaagggcatagtggctggaaggttgcagggcaaggcctattgccagaatcttctcagatatcccatgtctgttggagcattcttctactccagtgtggatttgcctttctgatggctttgactggagaactgtattgggtagttcatcaaaataagaagccttgagttcatatagtgaaaaataagatcaccttttccctttgttcattggcttgatttattaggattgtattctcaaacctttcctgctattaaaggaaatgaccttagtttgtgttgcatgaaatagcattaagtcaagtttacaacatttcaaagttatggtcagtagcattccaattagaacctaaaaagcttacctagctgaggtttaagtcgttgatcttggaaaaggtaaagacttctcagggaggttgggctgctgtgtatgacagctagaccctcagttcttggtctgttagcatgtggcccatttcttcctatccatgcccctccataaagctttgtgcgctggtagtatttacagtactggatgataattatggcattaattatttgagataaatggagtgtgcccagtagccaatagactattgttagagtattattagtatttttataggtcttttggatagcattctatttcaagacatttgaaaatgtagaccagattagtcaaaagcattgtacatgatctgtccatgagtgtaggctctcattagaacttctggaatcattctgaaatatacccagctagataatactaagtcataccaattaaaaggaaagacttgagtttgagttatagaatgttggagagaaatctagtttattacttttaatattgaagtcaaattttgatttttcttttatggttaatattacctgggtcctaagaaagattgcaaacatgttttcttaccttttttcttgtagaagctttatatgatgttagcttttgcatttaggtctgtggtccatttcaaattaatttcttttctatggtatgaggttggggttaagaggttaattccagccacctcccttgtgggtatccagttgctccagcaacatatgttgaaaatgctttcctgtcctcatttaattgctttggtacctttattgaaaatcaatggatcacataaatttggttctgtttctagggtctctgttctgttccattgacacatttgtctttatgctatctctgtactgttattattactgatgctttgttttaagtctaaacattggattatataagttcttccatttttgttctccacccctcactacaagattgtattggctattctaggtcctttgcatttctatctaaattttagaattaacttgtcaagttctataaaacagccctctggggttttgattgagatgacgtcgaatctataggtcaatttggggagaaggatagcttaagaacattgagtcttctaatcactgagtgtgatgtatctctttagatcttctctaatttttctcagcaatgttattagtatagaggtcttacatgtattttatttatccctaatttttatattatttttgattttattgcacatagaattttaaaaagaatcttctagttgtttattactagtatatggaaacatgcttgatttttgtatatgttgccttgtacatgccaccttgtcacatttacttattacttccagtagtttttgaagattctttagaattttctatgaacacaattattttgtgaataaagatagttttgtttcttccattctaatacttatttatgtatatatgtatgtatgtatttttcttgccttgtaacattggctaagaccttccatatggtatagaatagaaatggtaagagtgtagacattcttgccttcttcttgaactcagaaagtgtttattctttcatcactgagtacagtgttagttggaggttctgcataggtgtcctttattggttgaggaagtttccttctgtttctattttcctgagagtttttattatgaaaggatgttgaattttgtcaaatgtcttttctacatgtattgagataatcatatggtttttctcctttattttattgtggtaaattccattgaattttgcatgttaaaccaattttgcattcccaggacgcacctcacttggtcctgatatattatcctttttatatattgagggatttgattttctagtattttagcataggctttttacatgtatgttcttgagggatattgggtctgtacattttctttgtaatgtccctgtctggctttggtgtctgggttgtgctggactcataatgtgagaaatagtgtggtaccagttgctctgtcatgaccagcagcagaagtctagttttctttaagtgtgtagagtgatgactgttaggtaaagagttagaattattttaatgatcagccaagagtctctgctaagtaacatgaggtatctgtgaaatggcatacataactgttgtgtatgaagcagtgcatcagagaggctgggaaatactttaagtgggttgagcaactcataccattccttatgctaaaattgtacttatattttattagcaaaatttcttttatcactgagagaatgaattatctatctgattgccactcataatttatggagttatcagttaataaggttttattgtatgttaatatgagactcatttttttcctttctctcctctttgggttgtatttcttccaagtaagagcttaaattcatgggtcagctagtactgaccagcatctgttgagttattttgcataaatttggttacctggcctcagataagaatgtttttttaatctgtattggtggcattgttggttgctgatactgctgtagtttgttcttgcaagacttctgtttaaaagaagggttataaattcagtgtaactcagagcagaggtaaagtatagaatggaattagaagaaaacgaagcatcaatttcagtaaagtagaaatcgtttattaaataagcggtgggtgacagggaattgggagtaaccatcctggttcccatagtgatggtgcatccaggaaaaatacagggaaaaagggaatcattatggaagagttttgggtgtgtgttgtcatgctttaggaaacttgccaatttctacacctctgtcttcagattgtcgtgtttagacacacatcccacacaaagtgctcagcagtacttcttgtgctcgtctttatcccctggaatctagaggatggcacctctgggggagttattgtctcacatgatttagaaagacctccactattttctttccaagagtcgaaggaaggtgggtgagttggcctggcacctataagcagggacctacaacactgcttgaagcacctggtgacatctgcttgacaggcttcccctccccactgttgtcaccacttccatgggtggtgggtggtgttgcacggtgcccatggggtggtgtgcatgttctccaatgccacctgccctgcctcagtgctgcctcctgtaacagtctcatttgtttcgctggagtatccttatcgaaaaggtcttggggaccatttgcctaaaatgttccccagcatgaaatgtcccccacacttgctctgcacccgtgcacatcctccttttctttttttttttctgagacaaggtcttgctctgttgcccaggctggagtgcagtggcacaatcagtgctcactgcagccttgactcctgggctcaagcaatcctcctacctcagcctcccgagtagctgggactataagagtcccaccatgcccagctaattttaatttttttttttttttttgtagaggtgagggtctcagtatgttgcttaggctggtcttgaactcctggcctcaagcagtcctcttgcctcagcctcccactgggattataggcatgagccactgtgcccagcctcctcctcatttttgtagacatatcaagtctggcctccttcaggaagccttccctaactaactaatcaagctccccgtgtttctttcctttaggatctattttttggatgtgtatggtttaatatacccttaagaataatgcgtttggaattgtaattgagaagacaaggtttacgttagcagattatagtctaactctgatttttagaaaagtgatatagaatagagacttaaaaaaaatgacattctcacataggttttggatatttggagataggaggaaaaacatgtctttaaaccacacaatgggaagtgaagtgtttgcaacaaccagaacatttaggttataaagtgtcagagcagataatttaggctaaaagaaacaaagttaaatgatttggtgggggcttgatttctctggattgacccccctggactattggctgtttccttcacttccagactgtctggtaagatttttctacagaggtaccttcttattaatgaattcttcccatcacacccactctgtttgaatttctgaattaccttctccttttggtttctgtatctcaactttcttcttattgagtcttctctgacagtttctttgagggtattgctatcagagtcagacatgcccatgacaagattccaggctgtgtaatcttgagcaaatcaatcttgctggtctactttttttcttaaaagaacaaggaagcttgccttgcagggtggttagaatttgagacaatgtatgttgcatgcccagcaggtggcaggtagctaataacaggtgtgtgcttgctctacaccagggatcccctcggtctttggtctttgcatatcatagatactcagtaagcgctctcccaaaggattactgacttaacaggtagggtaatgtttatagccaaggggaggtgagtgtcatcaggcccaggtttgtatgcctatttctactgaattgtcgcaaagttatgtttcatcctatttaccaagttgtatttacagaagactagtcctgttataacaaagcccattgaaacaacacccaggaagtagaccacaagaagtcagtgggtatcttactctgtgtcctgcagggggatctggaaatgaataagggagagagaaaatgtggagtgcagaggatgctgcctggaggtgagactttaaccacatgattattctcagttatggagcaatggctttgttccaggcattgtctccaatagtcacaatcacaccatagggctgatgttttttctatcccactgaggtgtaaacagaggccccaagaggttgcatctggaggtgcgtgagcaaaatttggagagaagtaccaagtgggcacttcacaacaggtgaagagaatgaagagatggataaagataagtgttaagcactttttggtggtactggaactttatcatgtctcttgatttttaagaaaagtggcctattgactagaatttgagactttcattatattgttcagttggcttttgcatgtatattgcttttatgtttttgatgcgttttttcaaaaccctttaaattagttggattttatgttgttcttaagtttgatgaggtagacacttttttagctgggaggaatagagaggcagtgagtgtgttaacagaacacagcaacctcagactccagcccccgctctccttttatccagcggtgtgacgttgagcctgatgcatgacatcttggcagcagaggtgctggtgctctgtcaggctccgggacccctgactgaacatgcctagggtcatgaggaggtttttgttcctgtaacattggccacaactgcacagccagtgggtgaggatgctgagatacaaactgagaattttgcacttcgacctaggctctttgctagatcaaacttcttttgatgtcttagccatgatccctctgagatatctctctccaagttattaatatatctgtgtttcccatcatgtttccccttttgtcttggcttcaaagaagctcagagctaaatttattgcttgattatagttgctggattggccaaggtttaaaatttatgtttttaacttttttatgtgattccctccccattttcattttgatagtcttattgtttattgtatatcaccttaaatactttgagaagtagatcgggtctacgtttaaaaatcgcgtatgtgggaggagagggccattcggcaaatgggaaagagattggggtgactttggccaaaaaagtttgggatagatttttgtattctcttgtattatgttattccctatcagatggtctttgcagctcatttttctgtcttcttctgtgtggtcagaatcaggggagagtttttctttataaaaatgatttgttttcctgatagaacagtgctggtgggtaacattcagttctgaccttgtaggcagacctgggattcccagagggtgcagggaccgcagcactcactcttctttgtgacaggcctgaggcagcttccctggggtccccagcctgcctcctccacggctgctatggccgtgggcgctgagcacgtgcagctgctgcctgatgctcctggacagggaaggatagattttgggcatagttactaggtgtcactgtctccttttttcagcctggcttttacaagtagttgtaatttacttgacaaacacttatttggcatttccttcaatacgctgggtactgagatggttactgcatttttaggcatttaacggggataatagcatcatcgttaataattacaaatatgatcgatccatcatataggcaatacatttcagaagaatattattaaaaagactcatagtagtgggtgtatgcagctgtagtagaggagctgaagccactgagttaccccggggttcaagatggggagcagcattcccatctgtaggttgtgttcttgagtgggaaggcctccttggatacctctcgacagtaattccaggtacttgagctcacaaagaaagtgtctggggccctcagccctttggtgtggctcccagggacgcctgagttatttccagaagtggcgtggtgggtagagtgtgagggcaggcctcgcctccccgcccctctcccctgtgtggcttttcctttctgtaattcaactgattgcttttccttccaaattgctggcttaagctttatcttatctaattttatctcctccagccttgtacgtccagagcatcattagggcctgtgcccattctgtccctcccacttctcttggtctccctccacgtcctgaggggatagaaagacggagtctgcataacctccgcatcttcctgcctgggagggcggctagggtggtgcctgcagcctctggaacctctccattctgtgtgcccctcaacctcatggacatactggcgtttcaggacctggccctgctttctctgtccccgtctctctctgcccactggtttctgtgacccacgcccttcccaccccattctgccccttttcctcacttgcttttcttaccttctgtcacattcacatgctcactatttctttttactccaagcatctgttcctctaaatcatgaactgtagttggcataattaaatatgtaatgtgtttattttaatatcaatatgtcttttcatacacatattagtaagagacttggctgtcagcgccgggccagatcaccatttgcagatgtccactcacgccagctcccccacggaacgtttcttatgcacctcatcagttctctttctccttgtctctctttctgtctctgtgtctctttgttctgtgtacatctctctgtatgtccctggcttcctctctaacacaaattgctccaataggccggcaccttttcctctccgtaaaccccagtttgtaggtacacacaggcacccaggcaagggtagagaaaccaaagagcgcttgttcacacttgctcacacaaggaccagcagagacctagagctgcatgccacgtctttattatccttgctgctagctcctctggtacagcagcactgtgacagtttggaatttgagcctgggcactctcccctgagtgcatcggtgacgtaaaggcaggcaggcaggagcaatcacagcctcccgtcgcctgtgtgtcccaagtgagccccctccccaaagggatgtagggaagccagtccatctgcaaggtatctggagtggagtgacaggaagcagaggatccagtattattggaatagattacatggtatgtgcttgtcacttccgtttaaaggtaaatacaaatctgtctttggcttagaattctagcctcctgacctggggggtgaatattgactggcaggctttacctcccatgtagaaaagagttgcgtgccagggttataaattagagctctgcattggatggatcttcttaatgttttctgtggagtggaattagaacatgttgtttcttttgaggttgcaaaaagcaaacaaggatccctttcctcccagactagtgggaagtagactaattacttgaaatcctgttttatcagccataaaactgagatgaaagctggggcagttatgaagatcctgatatatcctagaccacaaatttctattccttttctggaagagaaaaactgcattttaggtttagataatttggtcaaattttttaggctatcaaatgcaaagattaagtttctagagtcttgaattttagcacagagatagcatcacttaaccttcccgagtgaaaattcctgccttctaggtggtggggaagatcaaacgagctgtggatgccagcatacttaatatgtgttcagtagatattagtgacagattcagtggatatgacggctgaaggcctgggtggctcttctgggcttgttggttggtttcattataatgtatatggttggacctaagataacccatgtttgtgcttctgtggacactggtgctttcagggtcttaactatattgttttcatggaaactttgaaaggactcatggctccaaaaggggctgaaaagttttgaatttccttttttctttctttgcaaaagattttacagcttaagtcatgtaattaataacaggggaggttaagagtcaaagatttttctcttaccctggtcattttcgaagctgcacttggcatgggttgaagcaaatttgtgtcttcttgaccatttacttttttttttaactgagaaaatagattctatctctaatgaagtaattgtaaacagccttgttaacatatggtactgattttttcacagaagcattgttgaaatgcatgggaactaccaggttaaaagacataaaaatagacaatctatatagtccagatggtatctccaaactaggggatccaagtggcatgagaaactgtctagagcaggagtggcaaacacggcccccgggccaacacggccttatgcctctttttgtatggcctgtgaactaagaatggtgttttacattttttaatgtttgaacaaatagctgaagaatagtaatatcttgtgacatataaaaatggtacaaaattcacatttcagttaccataagtaaagttttattggaacacagccccactcatccatttacgtattatctatgggtattttcctgctacaatggcagaaatgagtagttgcctaagatatttgctgtctggtcctttacagaaaaagtttgccaatctttggtctagatggtgaggaattttagttctcctatgtgttaactgatacatgatttcgttttgaagttcagcttttaactttcggttatttttctttctacttttattttttactaataaagacagaagaaaaccatggctggttagtctcactgctcagactatgccttctaatgtttttgataataaaagttaaaatgcacatgctaattttatttcaaacagtataagaaagcaaaatctctctcctacattgtcctttattccaattcctttacccagtgttaacatttaatagttaacattccaaaaaatgttttgtttatactagaatatatattcttttcaaaagcttttcttaagcttagtttactagtaaaaatactcttaaccttttactatgaaaaaaattcaaatatgtacagcacaagacagaaaagtgtaatgaaccctgtgtacccatcattcagctttcataactcttcgtcttatagccaatcttatttaatttgtggaatccatttcctgtattattttgaagcaaatctcaggtatatcatttttttctcaggtatatcagcaaatctcaggtatatcattttatctgtagatatttcagtatgtatctctaaaatataataacttttaaaaaacataaccacagtctgctaacacatgagaaaaaaataataattccttagtgtatatttgagcactgagtattacctataattgtctccccacacccacagttgtcttttaaatgtcatagtttattttactctctttgaattaggatacaggtaggtttcacacagtgtgacttggttgttgtcctttaagtctattttaatctgtctgttccctctgtacacactcttttatcctccttgctacttattttttaaagaaatgaggttacttgttagaggttttacatccccatagtattgtttaatatgttcctctctcctctgaatttcctgtgaatttggtagttggacctacaggctcataacattcaagttttgttttattttattactattttttagctaggctacttcactggtgacattgagtccttccaagaggaggcacttagtatctgattgtccttttttgtgatgttagtactcattgatgtttaatgtgtagatcaagtcattccttatgggttgtaaaatgctggatactcttagttctatgatttctgtgacatttattggcttaaatgtttgatttttctccatatttaccagtttttgaagttttttttttttttttttttttttttgacagagtctcgttctatctcccaggctggagtgcagtggggtgatcttggctcactgcaacctctgcctccacagttcaagcgtttctcgtgccttagcttactgagtacctgggactacaggcgcacgccaccatgcgtgccatgtctggctaatttttgtatttttaatagagatggggtttcactgtgttgcccaggctggtctcaaactcctcacctcaagtgatccgtccccatcggcctcccaaagtgctgggattacaggcgtgagccacagcgcctggcctgtttttgaagttttgacttaacttattagtaccctttaacagtgactggtttgttttttggtttttgtaatttttaaaagtatgatatattttagcatatttactgtgttctgctgaagttactgaccctcagatcatcccccttgtggtagtgtgaaccttctcacattggtccctgtgtctgtttggcatgacctagtagtctctgatagctttctctctttctggtacaacaagatgttttggattcatcttacacatttcttgccctggatctggaatcagccattttcttcaaggagtcagtcctgctgctttttagtgggagatagtatttcagaactaaattttgggttcagaggtacatatccataaacaaacagctttttatagtaaaaacacatacagaaaatgcatacagtacaacaccaatgtagcctcaaaaaagaacacagcagagcaccgcaggggatccctttctgaacacagtcttctcccacttccctcagtcaccactcagtgtttatggtaatgacttcctcgattttctttcctgtttgatcatttaagacaaaatacgtccctaagcagtatcacttggttttgtctgttttgaattttatttaaatggatcatgcttcctgaatttttttttttgttgttgttgttcgagacagagtcctgctctgtcgcccaggctggagtgcagtggcgtgatttcagctcactgcaacctccgcctcccgggttcaagcacttcttctgcctcagcctccctagtagctgggattacagatgcccaacaccatgcctgactaatttttgtatttttagtagagacaggttttcaccatgttagccaggctggccttgaactcctgacctcgtgatctgcccgcctccgcctcccaaagtgctgggattaccagcatgagccaccgtgccaagcctcctggattcttttatatcttgcttctttcattcaacatgagattcatttgttttcattttctttgcaatatgatactccattggatgagtagaccacaatctatccattctgctattgatgtacagtcaagttgtttctagttttgtgctgttaaagaattgctgctaaccttgtatctgtctctggttgcacatgtgcatatgtttttgaagggtatatacatagaagtcgaattgctgggttagatgctatgcatgtcttctttccaatgtgtcatgccagctgatatgctcaccaacagcgtgtgagcattcctgttgcttcacattcttgcccacacctggaattgtcagactttaacatttctgttagtttgttgatggaaagtgatatctgactgtgactttggtttggtgtttctctgattaccagtgaggttaaacacttctccatatgtttgagtattggacttttctcctttatgacatttctattcaagttgtttcagtaagtctttggttcattttcccattgagttatcttttattgattcataggcatttttatatgtattgggtacaggttttgattggttgggtgtgttgcgaatttcttcttccactctggcttatcttcactttctttatggtgtcttttgatgaacacattcttttttttttttttaaacacaaatgctatttatttgtttgtttgtttatttatttttgagacggagtctcactctgtcacccaggctagagtgcagtggcatgatctgagctcactgtaacctctacctcccaggttcaagcgattctcctgcctcagcctcctgagtagtggggattacagacatgtgccaccatgcccggctaatttttttttttttttctaatggtagagacagggtttcaccatgttggccagcctggtctcgaactcctgacctcaagcaatctgcccaccttggcctcccaaagtgctgggattacaggcgtgagccaccacgcctggccacaagtacttttaaaattttattgtaggacgtcttcctccactttgttgggatatgtggtatatagtaaagatttcaaatatagtaattattattatatactatttagtattatatgcaacttatatatgatcttttaaaaaaagtcttatatctttgcctttctatttaaatttcctttaaaaaaaattgacaccaaagaaataatagtgtcacattgtttgcaccttactttttcacatacaattttattctggagctctttctacattatccatatgccagtcggcttcattctttgtcatggtggcatgatatatgtatatatttttttgagatggagttttgcttttgtcacccatgctggagtgcaatggcgtgatctcggctcactgctacctccgcctcctgggttcaagcgattctctggcctcagcctcccaagtatttgggattacaagtgcacaccaccatgcctggctaatttgtgtatttttagtagagacagggtttcaccatgttggcccggctggtcttgaattcctgaccttagctgatccatttgcctcggcctcccaaagtgctgagattgcaggcgtgagccactgtgcgcggccggcatggtatttcattgacagaattaaggttgtttttcttgtttaaaattgtgctgcaaaaaactctggtacataatcttgacataattttgcgagtacatctataaagcaaattctaaacatgggaacttctgggtcaaacaatttgattgttttaaatattaatagacaatatttactcccagttaattcatgtaaaatagcagttcatacagcctaaattaggaggtctaactggccatattcagagaaattatctggatatgaagtaattttttgttaggtctaacctgtattaatgacaatatgattacagtattttcaaaagattgacacttagccattctccatgtttcaaaggaataaatgctaatttagccaaataatagtttggagcaaattttgtgggagagcctgcgcttgtgtggagcaaatcccctgtcgtgttgtgaaatgggcgcggagaagcctgttctagtgactgtcgatgctctttgtgacagctaacgtgagggctctccggctcctgagtcatcctcctccccaaatgggggactgaccagtcttttggatctctgattttgttaaagcggaaatgtttttctctcccattccagtaattctttgagtatatctgtttttcttcagatgtttcgtgagcacctgtgttctggggaatagtgaacaccgtgaggaaggtggagtgttgactatgccatccactgtttgtcttcaagcagattactgtcgcgtaggggagttgtgatgtagtgtatttgtataacggtcttttaccataagtgggtattactccctccaggacatcatttaagtcaaggcagctgagacaatcacaaaagaccacgtattttatgattccattaatatgaacatcccaaatagggaactctatagaggcagaaagtaagatcagtgattgtttcaggcaggagagagtggggtgatagggaggtgatagctaaaagatacagggtttctttttgaggtaatcaaaatgttctaagattgaccatggtgctggttgcatatatctgtgaatatattaaaagccattaaattgtgtacttaaatgaattgcatggtatgtgaattatgtttcaatgaagctattaaaaaacattaaaaacaagcaaaaaatgcaggttttttttttttctcagttgtctcagtgaagttttccctgtaggtttcatagttactttaattgaatggatggtaaagagttgtctggtctgggctagatgcagtggctcgtgcctgtaatcccagcactttgacaggccaaggaaggtggattgcttgagcccaggagtttgtgaccagcctgggcaacatatggagactttgtctctacaaaaataaaataattagcagagcatggtggtggtgtggctgtagcactagctactcaagaggctgaggtgggatgatcacttgagcccaggagttcaaggctgcagtgaggtttgactgtgccactacattccagcctgggcaacagagcaagaccctgttgcttaaataaataaataaataaataaacaaataaatattcaagaattctcaggtctggatgtagggttagatgccagttagatataagtgaaatagccggtttacttaccaatagacaggaaagtagtcttttgtgattcccttctccactaaatacaaatcagtgctactcaggggctctttaaagaaggagttggccaggtgtggtgactcacgcctgtaatcttagcactttgggaggttgaggcgggtggatcacctgaggtcaggagttcgagaccattcctgaccaacatggagaaaccctgtctctaaaaatacaaaatcagctgggcgtggtggcgcatgcctgtaatcccagctacttgggaggctgaggcaggagaatcgcttgaacccgggaggcggaggttgtagtgagccgagattgtgccattgcactccagcctgggcaacaagagcgaaactccgactacatgtaccctaaaacttaaagtataataataataaaattaaaaaaaaaaaaaagaacagcagcagtaaaaaataaataaagaaagaaataaataaataaatgaagaagtcaatcggtaccataagaaaggacaaaaaccaaaacaaacccaaagcaaaaccaaaaactccccacaaaccagcctcccctaacccttttaactcaaagcttcgtaatgtctctgaatttataattacgattttaaagagcactgtttctcatgccccatcccccaacccatttcgggagtaaaccttttctgtcagggtgaggagaaagtgggtaaaggacttcagcatttacagttgagttagtatttgttgttctccaaatgtgcaggattcagggccctctctttggtaggtgtgtgggaatctattggtatttattgggttcttaatgcctgcctgtccttgtgtaagacactctggcagtacccaggaatacatcaaccagctgagacaaacatgaagaataattattgtcctaataatagctaacatttattgattgcttactatgtgctaagcctctaaattttaaagttgttgtaaaagcaggaacaaagcctgtgacatgtaccattgtcttatttagctctcagaatcacagtggtagaggcactctcattattttacaggtgaggaaactgagattcagagggcttagatatctcgtccagggtcacatggctggtaaatggtagattcatacccagatcagcctaacagatctgaactttttcttgttgggggagaggggcaatggaatttttaacattttcattgcacaaataatgcaaattaggcaagaaaagcacaaagaagaaaataagaatcatccatatttctacacacagatttgctcatctttaatgtttctgtgtgtttccttcgtttgtgtttttatgccttctgatttatttttatatccagtcaatctctgtcagcccatcagtgaaggccattgctaattcattaaagaccttgggactgaggacatacaaatcataatcaggatatttcatggactggggattgtgggtgggggaaggatgcagatctgacaaattcatgctgtggtctaactcagagagggtcatcttgtcccaaagtgtcccctcagtctttctctccttccccaattaagactgtcttgtgaaataattaaaaatatctataaaggggcaaattttgcagcacatataattatagaaattatatagtacaatatggacaaatgcagggctaacagtaattcttagggctttcacagatgggcaaggttgggggtagggaccggctggaggcaaagagaaggcttcctgagacagaggggactggggctggctcccacccagatgaaaacctgcaaatctcagggagaaagcttcatgcactatgaaaaggtcacaagaacctccagtcctgggatgatgcaggcaagggaaaaatcaaatgggactttccccattgagtcatcaatcatttgcctggtgattggtgggagtcacctgtgtgttgtgcctgttcccagtgggaggttagagcttcatctctgaattaatatcaaaagaagagctgtctttacaaatcaatatgcttctcacaaggggatggcatatttagatgcagaggttggcatggcgaatcggatggtttgagggtagtggggcatctgggttaaaggccctgatgttctacagacttgggtttgaatcttagctgtgctactctcaagcgctgtcacctggcaagttgcttcgtccctcattcgaggaagtggggccactggagcgtctacctcataggcttacaggtggttgggaggattaaatgagatgagcacatgcagcatttagtacagtgcctggcatagaataagtgctccatagggattagctaatgttttataattctaaaggggaggaaagatggatattaaggttggagaactatggatccttcccattgtattcacaaagaaaaccatgccatgaggcttttttggcaagtcactttaactttttgggcctaggttttcttaacagtgagatgctgggtggttctaaatgatctttcaaattctgcccatgactataatcctatgattctgcagttttaaagagcatcttaatgaatacaaagtacttgccagaatattttcttttttgattctccccacaacagtaatgggccgatgatgattcctgccattttcccagaccaggcagcagagctggcagacatttaatgactctccctcacaaggccatggagctcgtgagagagcataaggccaggttccctttacacacatgtggtgtgtaaaacggatgtacctcgattgggcttttgcccttgtcatggaactgagcccgaaggaggttcttagaggagcggggtgaggatttcaggagaggtgattcccaggggagcttcaggccaggactgtcatagtagagcagtaatttatgggcttctgacagcttgaaaaggtcatggtgttcttctttacttataaatgaaaacaaagtaatttgggggtcagggaaagacgaaagggcttgtgcagactgacctcaaaatccctggtggttatcatgtaaaaattcgatttgtttgatgcaattagccaaacctggacactttcttctccttctcaaagcaattgggattcagggcacaggataaaacagagttggggcagggggcagggaggaggcgctctggcaacagtgggaagtccagattgtttctattgtgcgtgctgatgtaattctttttctgcaagccctctgtggtttatcactttgccttcatgcacccttcttataaagcaattacagaatcacgggaaaataggcagtagcagtgtgaatcagtgccttttggaatggagaactgatacaaactgggcttcagtttgcagagggttgaggaatgtctaaggctcgtggatgggggaaggagaagtgacaagggatcacagatattgtatattgggcctctttggccaggccctccagtccccgaggcccttctatgctgcttactggctgcatgagggctgtggctgtggccgtcgccgtgtcagctgagcttgtaatttagatgttaccactgctcaactatgaaaagtcaggatcagcagctttgtcctagtgctgggagggaggtgtgggccctgggggaaccggcagctggatttagagtgtgaccgattccaggaacccaacagagctgcactagggccctcctcacctctgtgggtctgaatttggggtaggggttccccaaaccaaactgtccagacttttctgtattgacattgagtctatagtcattagtgatcagggttccgattaatctgtgtccttattttagagtagcttttggcttagggttctggtgaccaactggtcacaaccataatttagcttctgaaaggccataagagtcagaatttgtctaacaggaatctccacagagatcctgctgcatttataattgggcatttcctctgcatttacttttgccccttgtctcctactccaagccacccccatgtgcttgaatgttgaaagttttgggttgccaggctcaacttaccagcatggttccatttctgtgattattactaactgcattgcatcatacacagagcaagtggttggaaaatagacctgcgtcctagcagtgggcaagagactcgactctcctgaatctcagtgtttttacttttaccatgggagttgtaaaatatccagcccagtataacattggctggatgtaaaacagcctagtatacaacatgggctttgtaaagtgaggtgctgttggaaagttgtttgtagtaaattgtattattacatactatacttatatagtaccaaacattggcccaaagagttttattttgttacttctttttgatctcatcaaccatgccatgcaaaaaaagaggcattttagaaaagagggaaatggaggctcatgtatgttgagtgacgtgtccaggattatttgctgaataaatgtcaaaatcagcagtacaactaggtgtctggaatcttagtccagtgcacctgtcattgtgtgctgggtgcaaggcattaaggctcactggttgtggtcctaagtgctcccctgcctttgcctgcttgccccccattcatttgttcattggctattatgagagcagctgtaagccaggccctgtgttaggaatgctgctaacgagggcaacagggctcttgctctcttggagcctattgtctagtaggggagacagacttaaaaaaatattatggcgtcaattgattctctttattttctgcatcctgtgaatgcacaagggcccagagtggagagagacttggtcccctcatcttgggctttgtcttactttctctttccttctagaaagttgtgagtcagttctttagatgggtgcgtcagggttctgccttcctgtatttgaggctttgtgtacttggtagttggagatgatggacgttgcatttgtgtgggctgaagagaattaaggaagaaacgaggcagggaagtttctccgaggaggcacattttgaacccgctgttaacgattatggcagtggccctttggaggcagctgcctctcttgctgactgtcatgacccaaccatggcaattttcactgagactgcaccttctgtttgtgatgttttagttcaggtttacattatctgagtagaactgggaatgacaaggctatgaggtcctgcctatgcccctctaacatcgtttccccaccagaagttttctcctgaggatgtattaaatgccgactacttccttggaattgctggatagcctttccagcgtgagcaatggggacagctccagaagagtggcacatcaggccagggaggattatcccagattttacagctgggtaggtggaaggcaggtctggcttgtccccacttccatcaaggagtagaggtgatttgcaaatttctctgtggtttggtttacttctttctcttggtcctttgattctttccgccttcgtctttcctttttctttctctttgcacctttctcccctgaaagatcacttggcagaatggttagaaagtactacctttgtggcttagttgatggtgcacaaaataactgaagaagaaaacataccttggctttgcagattgtatccttctggagagctgaattttccagagtgctaaagctgaattgtatccattgtaagcaacaaagcttttttttttttttttttttttaaattatctttaaagaatccattttaaaaggaaattctctgaaaatacattacacatttaactaccttcagaagcagccggctgagaacttaacccgacattctctccatcatgccgggtcactgttaggaacatccaagattctgctgtgctcgagtgatggtgccttcaggttgcttgcccctgcaggtggtggctccagagtcttagacttctctggttcttctttcttttcctgtcccatctggatcccccaaaccctgacccctcagactgttaggtattatttctgcttgtattatctctccctttctgatttgtgtgttaagaaacaagacagcaatttatttagaaatataagaacagcatctgccatgtagtggttcttattgtagatactgcaatagtttgcataaacgttcccatttaacgtccacacagatctgtgaggtgagcagcattgtgatccttattttacagaggcagacgctgagtggtagagaagatgaccacatattctccttgcctggaatacaggaaatgaattcaacattcattcattggggacttctattgtacttgttagatatcattagttaaaaataattgatgttgggggtgttgagcagtaacagaagagttaaaaaatagaatattctcatagtctggttatgtacagggcttcacaaatctttgtgttgttttacagcacttagcgggccttaagaatgagagaaacagtctgcaaattaaatcacaatgcagatgccatcttctcactgctactgtggggtttagctctacagatcagaggatggctgagtatagtaggcattttctttttgtcacgtactgatgtcacaatactttgtgttcttttatgtggtctaattgcttcaaacttgaatgtgctttcatttaaatccatttatgttgcttttgtcaaatgggaatgatttccatatgaatttgaatttacatactcataggcccttgagaccgtgtggatatagtgaacccaactcttggtagacttgggctctatttttgcctcagccactgacttgttgacttgctgaagggccttgaacagaaatgattacttttctggacttaacactcctcagctgtaaaatgaggtaggaaatctgatgtgatttctagttggggacattctagaagattccatattgtatctcaaatgactgttcagagacacagtctttaggtgctcactctagagaggactgtgataagcataaagcataataatgtaaaccctaacttacaagtttctttaaaagttgactcttaagggtattacacttgctcatattttaaatatttaaaaacaattaaaatttttttccttcatattcaccattggcttttcaagcatgcacagaagtggtgtgcagatcgtttcagatcaatttatcataaaatctaagttgataggtgttctcttaatgatgttcttatactgcctgttcaccttgaccctttagctttgagtagattagagagtgtaggggaaagatctttttcccttcaaatactcaaaggatcatgtgttctcttgagcagttctgcaaatccatataggacaacaggagaataaggatttaaagtgaaagatttcagtcggctgctgagctgctgggaggaagagatggtgtgtggtgctgacctgtccctgattgcccctcatagaaagcgaattggctctccccacgttggctcccatggaaaggactgatgggagagagagtgaggagagctggggatgcccttccagaatgctgaccagggcacgtgggagcagtggtgctggctggccttcaagatccctttctgcacatgggagctgaaccagtgagatacagcacctggatcaggcagcgcagaggagcagtgtggttctcctctgtggtgtgaaattaccctggaaccaccaagcagggttcaacagcactgatccctcccatcaacccaggtctaggtctcactccctcagcaccatctcgcagcttctagcacccctggaggctctgtgaacctctcaccctgcattccttgactcttcatgaactgtcggccttcctgtgtaagtgggtcaggcaccatgtgacctgctcactgccagtttcttctttgaatagatgtttatttcatggatcattttgaagattctccgtgggtgtgcaacatggttttagaatgttgggtaatttctcatgtgttctttgagatggatggcttctcagtcgtctttgcagtcagccactgtagacttgagtttctctcttgctgtcttcattttattgctccatatctgaggaaaaccatgtgaaaaatccctagacacataggagccctgagaagtggtggcagggaatgcttgggggacaaaacagattttagagttacgggtattttaattaaaaaaagagagacccagaattgtttttcacttaaatgagcaattatatctttaacttggggatggaaatatgttgtgaaatttgtttagtcagctccctctgaaataaataaaattacagtgatgatatcattcttgtttaaaatgtttgaaaaggtatcaagacaaagtgattaaggcctaactgtttgccaaattttctttaaagctccatttttggggtatttctatgccaaaaaacatcttaaactgatgaacatatagttctccgcacttgtattggctggtttttaattagatgactgttttaatagtggaagaaatacatttaggttgggcctaagccccagggtgccagatttcaatcccagaaaaaaatgttctctctgtttagtgctaatgtgcacttaaatagcacaggtgtgagtgcttttccctggccacggtcacacatgactttcccaagggctgattggttatggggttggcaggtttaaggtcaggttccccggcttgccctccacccagaggagccaggactctcaggctccctgtaagggaagaagttacccagatcatgagcctgttttgtctgggtcagactgacttgagccacagggagtgggtacagaagcctgggttgctgccgggtatgacccgaccttcgtcttgtacccactgtctccttccttttgtgagtcaccagctcacacatctacatgcctgtaaatgaactatgaggtatcgagtatgtgctacctaccgtggtggatgctgggaaggatgaaccatgcattttcctaaacccacacttcgaggtttacaaagataaaatctcatggctctttgccatccccttctcaagaaccttcactggctctctttttagttaggaaagaaggtccaaagcaaaagaaaggaaacacagggtgtgaaggctggactcctacctaacacacctgtccattccaaacaaactggccgtgcctcctcctcgatctcccacttgtgtgggtggctgtgtcatttctgtgcagcagctgatggtgaggtctttcacttggctccatggtgaatggggaaattctcccaggcactcttcctgcctcatctgtgaccgtttgtcttcccctggggctatagtttgagtactaggtggtattttcagtcttgtctttgccctgaggatgcagaagtactctatggctatcccactcctgacctatgcccaggccccctcttccctctgggggtggatcccacttgtacgggcaactcagtgcagtaccctggaaaatggcagacctggggtatctctggtctctgccactgtctcccagtgtgtgtggaggggctgtatgcttgaggcattattttactgtggcttacctccttggtgttttctccaacttggagcttgggtgagaatgctcagggcttggttgacacctcttcattgtcccagaggtgtaagggctgggtcggaagctatgccaccagaagccatgctgccctttccaccagatacttctgtttctcttctcgacatagaccaattccctttctttctttttctttttttgagacagagtctcgctctgttgcccaggctggactgcaattgcacaatctcagctcactgcaacctctgccttccaggttcaggcaattctcctgcctcaacctcccaagtagctgggattaaagacatgcaccaccatgcctggctaatctttgtaattttagtagagacagggttttaccatgatggccaggctggtctcaaactcctgacctcaagtgatctgcccgcctcggcctcccaaagtgctggggttacaggacatttccctttcttgtttgatttctcctggtatcttctttctttctctttggactttctttcctatctcatatttattttgcttggcattgtagtagaaagataacatgttaccactttaccctccagtctgaacttggaactgctgccatacactaaaaggatttactattcttaaggatttccttccatcctaaactacaaactttttcaggtcaggaactacattttattttgtgtattcccactgtaccttcacctgctgagtgcttaataaacccaggacagaattgaaggcaggctgagcctgtataggagagcagttgctttcaagttatgttaaaaactcctgggcgggagcattcaaaaattactcatagataacaaatccagctacctgcacgtgcatgaaagcagggaactagagccactttcagacagtgacttcagcttaggaaacaaaaggttactttaaagtaatgctgttttacttatgtttaaccaattctagttgacacacttattcagaatggccttactgccaattagtggagcatgttagtgaagtttgtaataaagtcctaatttccgtgactaatgaagctttacttgtgttcaacacaatccctgctctcagttatgaagttataaaaaaatgtgtttatgctgttgctgccgctgcccgtctgtctgcctccctgcctgcctgcacagtctttaagagcactgttgctctcctcctgttcctcacgcatttcaagcacaaatccctaccattcatcaaaggcatttgctggtggtggcaggggaaatgtcacagcactgctgccactactgccaggtatctttttaaaatgtaatgtgtgtgtatgggtatgtgtgtgtgtatgacttccaccatttctacgggaatgttttttgattagaaaaagaaatagttgttacatttgcaatttgtaaccagaaccattttctttccaatgcagttgtaacagtgtaatgataagtagggtctttatccaaccctatgacaagtcacatgtacacacgccagacataggctccagattctgtaatatttagccctatacagtcaacagatttgattccctggcagtcagtctttgcattggaagagagagtaaaaattaggactggtgagttcaaaggttcttctaaggcctaagcctttgcagtaggagctttccatactagatatgttacctagagacttgtgttaaagtggaaaatcatgggctgggcatggtggctcacacctgtaatctcagcactttgggaggccaaggcgggcagatcatgaggtcaggagatggagaccatcctggctaacacagtgaaaccctgtctctactaaaaatacaaaaaattagctgggcgtggtggtgggtgcctatagtcccagctacttgggaggctgagggaggagaatggcgtgaacccgggaggcggagcttgcagtgagccaagatggcaccattgcactccagcctgggcaacagagtgagactctgtctcaaaaaaaaaaaaaaggtggaaaattatcatacaaatcatatttgtgtcaatctttgtgagggtgtcctaaactgtaagtgtgcctatatgtgtgttttaaaaccagaatgtctagtattgtaccacagaaaaaagacgttacaaaaatagaaattgtgtcagtaatttgcttttactgctatgaacaatcatatgcaattcctacaagtcatgctgtgtctagcctcacagccccctcactctccaggcctttctgccaaactcagcttctctgtgagcatgccctgatgagttcaaggggctcccttcttcgtgccaccacctttgagtccacaacaggatggctgttgaattgaacatgcacttagatttcgttaccgtttcctaggtctttttcaaatacattccgcttctctctttagttactttttagtctccctcaagggtagggattagattcttctttgttccctctcccatagcacagtttatgtggcttttgctgcgtgaggttaaagcacattggtggcttacatcttatccatttgtaaccacccagggaccagcacatggccttgtacccagtaaacaatcaatattttgttgattaatgatgcctaaagctggttaagttcttggactcaacattcttctgagctcaatgactatttgcattctagtcataaacaggaaaaggttctgttggcagccagggagatagtaaatacccctgactctcatacattgacttaatcagaaacaacaacttccccttttcaaatttgcattgtgaatgataatatcattttcaaatatgtaggattatgacattttaaagagaatataatgaaatagaatgaaggtgaaaacttgtaattatattagagcaaaactatgtttcccatagcttatatcctactatttctatgtagtgtatctggcgtggtcccatgaggatgccataaccaaatgattgaactagaaactgagaaagacttatcaaacatttagtgtcacgggcttgtgagatgaatcaatgctgggatttccagctatgttttttatggccctgtattttacaaagctgtggaaaatattgagcatttgaacaaggctctcagtcacagtcgtataacaagatgcaggatagggctttgcccgtggagttcagtgtgaaagtggctgtggttggtggaccttctgccctttcccctattgctctctggctgctttttctggtgggtgggtgtgtgtgtgtgtgtgtgttttttttttttttttttttttttctgaggtacttcccagggaacagagaaataagttgacaaaaggcacatataaaagagagatctaggactttctaaacctgaggcccacagccctttcatttaatgctatattggcacatgtcttttttctcttcaaatcattctcaatcatggtccatttctcaccaccccctcctcccaacttgttatcagttgcgcctgaccttttgggaaggaagaatctttaaaccctgtttgcatctcagcagacgggaatgcctgcctacttctcatctagggctcctttctctgcctttagaaattcttttttattcttgatacacactgctcagattatttattaatttaaaaattaacatacagtaaaaatcggggtgtgtgcacgtgtatacagttctgtgagctttaacatataaattgttgtatctcttaccacaattaagataacagaacagttttgtcccccgcaaaacttatcctgcctcttgtagtcctattcttcctttaccccagcccatggcaaccactgatctgttctctattgctatagttttgtcatttccagaatgtcatgtaaatggaatcactcagcataatgcctttgatattcatccatgtttaggagtgtggagaaatcgttcttttttattgctgagtaatattacatttatggatatagtacagtttatccatttatctgttgaaggaaatttgggttatttccagtttctggtgattataaaaaggtgctagaaacgtacaggtttttgtatgaatatagatgttcactagcgtaaatacctaggagtggaattgtatatttaacattataagaagctaactgctttctaaaatggctgtaccattttgtattcccaccagaagtgtatgagagctatagttgcttcacattcttgccaacacttaatcgtgtcagtactttttattttagcttctgtaataggtgcgtagtagtatctcattttggttttaatttttatttcctaatggataataatgttatgttatttcatgcgcttatttgccacctgtttattattattttggtgacttggtgaagtgactatttctgtcttttgggtttctttttactgttcaatttgaaaagtgccccatatatcctggatccaggtcttttatcagatatgtgatttgcaaatattttctctcagtctatagcttgtctttctattatctctcttgctctcttttttttttttaatttttttttgagacagagtcttgctctgttgccaggctggagtgcagcgatgtgatcttggctcactgcaacttctgcctcctgggttcaagtgattctcctgcctcagcctcctgagtagctggggctacaggcatgtaccaccatgtctggctaatttttgtatttttagtagagatggggttttaccatgttggccaagctggtcttgaactcctgaccttaagtgatcagctcaccttggcctcccaaagtgctgggattacaggcatgagccaccatgcccagctgtctttctgttctctaagtgtgttttgcagagcaaaagttttaaattttgatgacatccagttacttggtttttccttttatgagttatacttttgatgtcgtatctaagaaatcttcgcccaactacagatcataaagattttctccagtttttttcctagaagttttatagttttacattaagatctgtggtctatggccaggcgtggtggctcaccgctgtaatcccagcacttgggagtccgaggagggcgggtcacctgaggtcgggagtttgagaccagcctgaccaacatggagaaaccccatctctacaaaaaatacaaaattagccgggtgtggtggtgcatgcttgtaatcccagctacttgggaggctggggcaggagaattgcttgaacccgggaggtggaggttgcagtgagccgagattgcgccattgcactccagcctgggcgacaagagcgaaactctgtctcaaaaaaaaagaaaaaaagaaagatctgtgttctacttagatttaatttttgtagaaaaagtatgaagtttaggttgaagtgcgttttcttttgcatatgaatgttcagtgtttcaactctatttgttgaaaagcctatcctttctcaactgaattatctgtacatttgtcaaaaatcacttggccatacttgactctatttccagactctattctgttggtctttgtgtctgtcccttcaccagcactatactgttttgattactacagatttattgtaagtcataaagcggggtgacttgaattctccagtttcttatttctcaaatttttgtcgttcattttaattcctttgtcttttcacataaatttcagattcagcttgctgacttctaccaaaaaagcctgctgtgattttgattgcactgaatctatagatcgatttggggagaattgatatttcaatcatattgttttctaattcctgaacatgatatccttctctatttattaaggtcagcttctgttgagttgatcatgtgcttttgacctttattctattaatatgatgtattacactgatttttgtttgaacacaatctcacgttcttcatataaatcccacttagtcatggtcaaaatgtttatatgtttatatactgcattcagtttgctagcattttgttgatgatttttatgtctatattcataagagatgttggtatgtagttttctttgtgatatctttgtgtggtttttggtatcaggtaatactggccttatagtattccctcctctcctggtttttgtagaagtgtttatgaaggattgatgtgaattctttttttgaacatttggtagaattcaccagttaagccatatgggtttggccttttctttgtgagaagttttttgattactaattcaatctcttcagttattataggcctgttccaattttccatttcttctagagtcagtttcagtagtagttatttatttatttttcctgagaacttgtccatttcatgtaggctatctaatttgttgactgcatttcttttagaatgaattctcttagttttcatccctctgagattgttctttcacctgcatttcaaaaggatgcttcttgctaggtaaaggattatagattgacagctcttttctttcagcactttatcagaattgttcctcttctttctgacctccatggtttcttctgagaaatctgtaataattcaaatcattcttctctatgctgtatgttgttttcctctggctattttcaagatttttttcattgtctttagtttttagcaatttgtttatgatctttctaggtattgatttctttgagataatcctgctggcagtctgctgagcttcttgcagtggtaagtttaggtcttttgctaaatataggaagttttcagccagtatttcttcaagtatttttcctacacaacaccgtttcttctcttcttctggaactctagttccagtattttagtattttctttttagtattttcttacagatccctgagcctctgcttatttttataatctttttttctcttcatgttttacattagataatctctattaatctaaattcacattcactcactattcctgctattacctccagtctgcaattgaagctatccagtgacattttaagttttattgtatctttattttcaaaatttttgtttttgctatcattccatttattttaagagtatttagccttacttcttggagcatggttaaaataggtactttaaattatttgtttgataattctggtatctatgctatcttggggttggtgtcttttgattgtctttttccttgcaaattgagagttttccagtttttcgtatgttgagtaattttggagtatgttctagacatcttgaatatttttattctgagtcttatttattatggagactgtttatttccttaagcagataatcgacctggttgcaaattctgacctgacttctctgggctatgtttctgactttggttcagttttcaaagcctttacagtgtcattttagtctgtttcttttgtgtgcaatctattgttcagtctgggacctgggcaatgatatcctaaagtgaaaatctgaaggccactggcatacttttagggtcggatccacaacgaagagcttaaatgtgagcccacatgttaatatgcccctttgtgatgtaactctcttgagcttccttggttccctgatgtcctctttttgctgtcctccagctagaaagcgaggaatttagttcctctgttctcctgcattactttacgtgactgtgtccaaggccaagcgcttgaaggtcagggagaaaaagaagcaatggaaattcgccccttattctgggactacaactcttgtgagaatcattcttctttctcagagttttaggtacctgctccgcctgtgctgctgcttcttggtactgagggattgtctgggggctggggtgggagggattggaaaaaaacaaagcaatacagataatttctctgaacattaggagttcctttttttttttttttttttcctttgttggccagaaaatgagggttctcttcaggttatttctgtccatacccagctagcacttttggatggtgagctgcctttgaatccagactgggtgatactggagggggaaaacagtggaaaattctctgctggtttggtgatactctgagttctagtctcatttctcaatctatttgttgttatttacttttcagagtcctctgattcttcatgttttctgtctagcttatatatttgcatttggtaggaaagatagggtgggagttcttactccatcttgcctggaactggagcctctatattagtctgtttatttattaatcaaatcctgcatagagtgggatttaccaagcctggtttcttgagatcctaggatgtattcataatatgtatcatggaattctcaaataatgcttatgataaaataagcttaaattttccttactttaaagcagaggctggcaaatgttttctgcacaggaccaaatagtaaatattttagtcttgtggtctcatagtctctgtcataacttcttaactctgctgtcatagtgtaaaagcaaccacgaacaatacataactagtaaagatagctatggtccaattaaactattgaatgacactgaaatttgaatttcttatacttttcatgtgtcatgaattattatttttttgatttcttacaaccgtttagtaggtagtgggccagatttcgcccatgggccaaaatttactgaccactaatttatgtcatggatggctctatggccctgatcaacaactcctcttgattgaaattttctgtctgttctggagaaacaaagataggaaagcaagagaagttctagaaatcctatggaatgcttatggatacaacctgtaagccaaagtagcttctcagtcttcttttgaactccttaggtagggcacagagagagctcatagatgttttatcttaattcatctccatattactttgtaaggtaaatgctttcatcttcattttatggatcaagaaactgaggcacagagaggactgctagcatgtctcaagtcatgactaaactgggatttgtatccaggcctgtccagcaccaaagctgttgctcttcacactctaggatggcacaaatctcctttttttctgttttatcttgtctctgtacaaaaaagccatgtcaataatggtataggtcattgaaagccttatactttaagactgctgcgctctggtctggacttactcatgaattattgcataactctgggcaaacctcttcatttctcaaggtcttagtctccatgcctataaaataggggattggatccctattttacgtttatttctctgtcatggtagctgtgagagttttgtcagtgagcatcctaatcacagacagcgactttggaaagagatggtacaccttgtcattggagggctgtggggagttgtagagaacaagcttcatcctgggaccatgtgtgatggctgttgacatagagctttgtagctgtcaaggaaaatagagtaaacacactacttccttttgatcttcagtttttcgcagtatgctcctagatcatacttctcttgatttagtgatagccttataaattattgccactttctttgaacccttattggtataagtcggtgataaatgcttgagaaactgggccttgatgaagtactggtatacctcgtttggaatttgttctgaaaatggtaaagcatttcttaaaggctttgttataatatgaaaatgttcattgctttttttgttcattctataatttttttatcccttttacattgcatgtcttgattacatagttgatttgatattctctgaaatgtgatggaaaagaaaatgtaaacacaaaattaaaaagcagaggaatgaagacacattttgtgtgctgcttcgtgccagatagttttgtacatatccttgtacaaagtagtggtctcatttttaccacagtgagtaagcccctggtctctacctttaaggaacttagagtttgataggcttagtggttctcaactggcattaccctctcttgagggtatttagaaatctgtggagcagctgcaattgtcacaaatattgagggatgctgttggaatttagtgtgtgggattttatcacaatgaagaattatcccaccaaaaatgtttatagatctccttttgggaaacactgtgctgagtaaaatagtagtaatgataataaaaacacttgcatattgagcactgccattgtgttcagagaactctacagatacagtccatattctctgatatgtagctctaaattcagaaatctctaaaattgaagtgggttttttattaatccatttggtaaaatgtgacctgaattgatgtgagaacttttatttttttaaagctgagaactgtattttttatagctgtattgaagtatagtttacatatcaaaaaattcacctgttttaagtgtacaatttggtgatttttagtaaatttaaaaagctatatgtaactcttaccacaatccagttttataacattttcataaatgcctccccccccaaattctcttgaacctgtgtgagatgatttccagatgtttcactgaagaaatatggaagtgtttgattatggagtgctgctccagatccttcctgaatgctaggtattcattcattttgaattccaaatatacccggctgcagaagtttcttgtaagagattgtggactgtatgaacacatcccatccccacaataaccctggaaagtagatgctattattgttccttgttttgcagttcaggaaactgaggcatagcctttatacaaggctgaatggaatgtcacaagaaagtccagtgggggtccagaagagaaaatctgtgaccacttggcctgtaaccgaatttgcctatatttaaagatggaggaaataatctttttgttttgttttgtttttttagttgatactaaaggatatgcataaagtatttaaagtttaactcaagatccagtggatatgtgtggaccctcactacctagtctataactcaccacacctttcactcctttgggtgtccatccttatcctctgtccccctcccacagggatgaccactgtctaaaatttgtgcttatcaggccaggcacggtggctcacacccgtaatgccagcactgtgggaggccaaggcggatggatcacctgaggtcaggagttcaagaccaacctggctgacatgatgaaaccccatctctactaaaaatacagaaagtaaccaggcgtggtcgtgggcgcctgtagtcccagctacttgggaggctgaggcaggagaatcacttgaacccgggaggcagaggttgcagtgagctgagattgcaccactgcactccagcctgggtgacagcctgggtgagggcgagactctgtctcaaaaaaaaaaaaaaaaaaaagtgcttatctttctttgattctctttagttttaccacatatgttttaattcctcagcaacactttaattttgcatatttttgaagtttatataaatggaattatactgagtatattcttctgtaacttagttttccctcaataatacttcttagatttatcggtaattcattagttttcattgttcttttgtagaatataccatgatctatctatactttgactgttggtggacatttgtgatgttttctttttttctaaaaagagataattcaaatggtgctatattgaatagtcctcctgaatttttcttgatacatatgtgctaaggattatgtaggcatgaaatttcagggtcctattgtgggtacatcttcagctttattggatgatgcctagttgttttccaaggggttatataaatttatactccctccaataatttatagatgctaaaatttttccaatctaatggttctaaaatgatatatcattctgacttgaatatgtatttctgtgatgactaatgagattgagcatcttttaatatagccatttagttttccctttttgtgaagtgtccgttgagtcttatgtccatttttctactggtttgtctttttttttgagacagtcttgctctgttgccgaggctggagtgcaatggcataatctcagctcatttcaaccactgcctcctgggttcaaatgattctcctgcctcagcctcctgagtagctgggattacaggtagttgccaccatacctggctaatttttgtatttttagtagatacagggtttccccatgttggccaggctggtctcgaactcctgacctcaagtgatctgcccaccccggcctcccaaagtgctgggatttgctgggttgtcttttgaatactcatttattaaacttctttatgtgctctggatactgatcctttgttgtttatacatgatagaaatgttttttccttctttgtggcttgtccttttgatctctttttggtgtctttggataaacagaagttcttaattttaatgtagctaatttatcattttccattaggagtttttttctttagtttttaaattagcgtttatggagtactttgtatatcctagacacctttctaagcaccttataaatatccattaatccttataacattagaggcaagtactgttgctatttccattttataggtaaggaaactgaggcacagaatgttaagtgactttttcaaggtcactcaggtagtaaatggtagagccaggacttgaaccaaagctgtttaaggaattcttaagaaaaccttttctaccatgataagatgtgcagatattcttatatgtcctctgaaacttttttgtttgtttgtttttgttttttgcctttagcatgtaggtcttcagttgctctctaatagatttttgtgtgtggtatgaggtaggggcccagtttaatttttttccatgtggattatcagtgtttcagcacagattacttaaagtctaaccctttccccacctctataatacatgccttataacaaatcaaatttccttatatgctcatatctatttctgggttcattgttttagtggtgaatttgtctctgtgtcagcactgtactgtattaattagtatgcctttataataattcttgatatcagtaagtcaagtccttccatcttgttctactttatcagcagattcttggaaagtttcctactctttaaaagcaagattgcaggataatttttgactgtaacacacacacacacacacgtacacacatgcatacacacattggggctttggaagatgatttgtcattgctattgtattgacttgtttcctgaaaatttagcagatataatttcatttgagtggcttgagctctatttatctgcatggccaaaatctcaaacacacatgatgtagtggcttgtagaaagcttttgattcttgttaaatggagaggagggagaaaggaaaggaaaatcagtctggtagattactagtgtcttctgtttaagttcagttgcgctgataattccagaaaatatactgaggaacttcaaaaggcatgtggaaccttgtgtagtatgatttatactaatcatagtatgtgtgtatgattgtataaggtgaaaaacaagataatgcatcttctatgattaagttgccttacttatcaagtaagaggtaactgtaccccgttggtcttaaatagctgatatgtggtttggtacttaatactgtctattggaggaattgaaatagaatacccagagatacccagagtctccactgggaatacttctgctccccaaatgtgatatcagagtaatatcaagtagaatgtggagtacacccacctatcgaggcacaaactgccctctcccatgaccctttctctgtagaaagtattacttatactgtaaatagcagtcaaatttcaagtaacatcagttctctacatcttagccttttccaatctgggtggccaaagtgaagaatgattaggtactgaaaatttataaatgccgtgtctgagaatttctagacaatgggaagacacctccctaaggaaacctgtcagtctgaagtcttcccagctttcagagcatagcaagttcttaccatagcctggagaatatgtgatctgccagtgcctgctcccccttcacctcttactgacatcccccttctctctgcaagagtgactgccttgctgttcttcagaatgccaggcaccctttcaccccaagcatttgctctcctcttccttctgcctgtatgtgcttccctggatgggtgtttggtttactcctgattacctgggtctctgctcgaatgtcatcttctcagagaggtcctccctgaccaccctctcccataatagcacccacattcatctctgccagccctccctgagttcctacatggcacctgacacatattcactgtctgccctccctcgcttcccctccccacacactaggaagtcacttcctagaggaccagggactttgtctttttaactgctgtttcttccacacatgtgccacagcgtggcacatgggagccgcttgagagctgtttgctgagtgaaggaagctgttggctgaaaggagggcagagagggcctctggagcaggcccgtgccccaccagccctccccgagagctcctgcggcagcttgcttgcctctctgtcggaaacttgcaccatttaggcagctcttccatgagtattcttccattacatgctaagcaccttgagacaaaggtctgtcttaagttctttccctactgtcacccctgctgttttccttcagggctcggactgagcctggcacgctatttgctcatgctatttgtcttcagctatctgttaagaaggcatgcgggtagcagtcatcctccccaaggggagcagcagattaggcagcactgtaattccttaagcaaactcctggcccaactagcatttccattctgaattcctctatgtactgtctttgagtcttatggagacgataatcttggtgagaaaagggaccagccatattcactgcaggatctcccgtggatgcatagcatggtgccagaggcatggtaccccaactcagcacacactcactaataattcatcgctaaagttcactttggcctatgtgaaatttattattgttgatgtccaacattacactaaaattataagaatttatgtacaatctctgtacaggatctgtagggagcacacagtttttcattatgaaagaggcttcgttgctcatctcagctcctgtgctgttgaacaaaaggtgttagacacacacccattccctacttggggtattcacaaatgtcagacctcaaagtctcttctgagtaaattactgcctttgcttcatttaaaggtgcccttgtgaccttaaagaattcagccacctttcaaaatagagctgtatttctactcccacctcaccagagggtgagcctcaagtgtttgattacagaggagcgagaacttactctctaggattaatgtaataagagatgaagagcagacaacatagccactcaccgaaaaccatgtattcataaaaaataagccaagcccaaagtctggatttcagaatattttcattaataaatactttattgcaatgaacagcttaattgcttaatctctgtgtagttatggacatgtcttgtatacactgcctgggctgtatacactgtgtacactgctggctggatgggcttaggcagaagcaagggtcaaggcttttgccagtcttgcaaggcaggcttgcatcaggaattcctagagactgaggagttctcattgtaggtttctttctgactgaaagaagcatggtgcgggcagagcactaggctgcgggggttagaagaccttgcctcacgactctaaataagtcgtttaacctaattgagcctcagggtcctcccctaatggagacggacacatcaaggggctgtttggatcaaatgagatcatgtgactgtttgtggataatgaagttctgtggaaagaagatgggagggtagcattgcatactgtcttggtaagacctcagacttgcttagctgcagctcttcaccctcttacggacctgcagctgagcagctaagcgtgattggaaatgtcattcagctacgatgactggtattctttaaaatgaccactgacttcaagcaagaacttcacaccactggcattgatgctacattcaggaccattctttctcatttctagacagtgatttcatatattttcctctctcccgaaacctccagcaccttccagcctcactctcggccgatggctttacttcccatttccctgagaaaattcaagccgccaggagagaacttctcaaaagcgcccactgccacatccccctgcctactcttctgtccacagatactgctgcctcccctgttagcatgggtgaccatacacactccttgctaaggccagcttctttactcgcacaccaggttgcatccagccttgcctgttgaagtccatggcagtgccgttctcctgcctctctcctgctgtcagctttttcttctagactggatcttcccagtcaatacacacaaacatactcttgttaatatctcccacttagataaccctttattgattccttttcagtcattagctactaccccatttctcttttcctgtatggctaaatactttaaattattttccatattccctgctgcctattcctcctctcatattcctcttgaaactcatcgtcatcaggcttttgctccctccagcctaccaaatctgctgtcatcaagatcacaactggtcttcctgctgttaaatccagtggtcagtttccatccctcactgtacttgattccacatctagcatcctccctcgttaatgcactttcttctcatcttctcatggctcccaggataccacactttcctggtgttccccccacctcactgttgcttcctttcagtcttctttcctgattcttcctggccatttgttgtcttgttggagtgcctggaggagtctttaggccttctcctcctatttctatcagcactcgctccctcaatgatcttacccagtctggagtttcaaatccatccagaagctaacatctcatgcatctccagttgaggcctcccttccacactgcaagttctcacatccctctgcccttggagaggcacgccctgtcctacttaccctcccaagtgcttaccactgctcactggcttaggcgtacgtgttggccaggggttgtcatctctgtgctctccactagaatgtgggctccacaatggaggactccgtttactgttgtatccatagcacttagaagagtgcctggcacatagtaggtacttattcaatattttgttaaaggagtgaatgtgttaggtctccatatacagtggagattctagtaattcgctgtctcaggtcctgtctcaactctccctactagtattagggcgccctagcctttcagagatggtctttgtcttggaactcttactaaatctatttgataaaatatgattgtttctctagaactctgttgaattgataccaggcattcaactatgcagtattaaatgtattctttatcattgatttggggaggctatttgggatagtagaaagatctttgactttagagccagatacttctgagtttaaattcttgctctgctgctaaatagctacagagccttagtggaaacatacagtcttaggccttagttttctcatttgtaaagtgaaagatttggttcatagggctcttgggagaaattacatgctgaatatatgaaatgcatctagcataatctctggcatataacaggcattctatagtggtaactatgatgattatggtccttagctatacggataatcttaggattgcttgcaattcaaaactttttggaaaaaaaaatgtaattattccttttaaatactggccgttggtctttggttcagaacataattgtctaatttaacattgtttctgtggtaaaagttagatttgatttacatttcaacttacagagcctttttcaggaatttattctgcttcaaagatcaaggacttcctttcagtgaaacttaacgacagtgcttaggaatggaatgctctggaaggattgtcttctaattaatgagaaaggagcttattttgtgggggaggttctaaaatgcctttatatgtgcactgagcataattccaaagttatacagtaaacactccatgaatacttggttacttgtttttgctccagagatacttaactgaactcctctattgattgccctgaggtatagctatggaaagtagaggtgatgctactaaatacaaattcaacataggcttacaaatatcttagaggagcttttctggctttgaactgtaaacgtcaacggagctatattcatgataattatatcttgattgtatcttcttagggaaaggattgtcaatggtcctagctcaaaggaaattgaacaaagaagttaagatagcacatgcaaacatacacatccgtgtgtgcccaaacatacggactctctcacactgttaaataatgcatgagcaaaatattaagtgcaaggtacagtctaacgcatatcactctgcagtatgtggtaagtgccaaatgaacaggataaatttaagtactgtaatttcaaagaacgagtcattagcaaaggctaaaaatggtcaaggaaggcttcctggaaaaagtgagcttggagctgggcattgacagatgagtcacactgtgcctcatgatgcagtgtgcagaactggtccagccagggtcaagtggatggctctcaggccagtccacaccctcctctgggggaactagggcaagtctgctggctgcctcagtccttccctgtgaatgcagcccattattcctgaatcacatccttgtctgccattggtgattttgggtgcttcgtgggctttgggtcaaggcagggggttcttaagtggggagggcaggaaagggagtttaggatcacgtttgttgtggggaagtatctgaatgattcatttgctgtgcgtgtctgaatctttctttggagatgagttgatgagggcaagctttggctgtggatttctctctggtgatgtgatttgatttgatggataattatggaagagaaggaaaaggagattcaggattcagacacagaaaaacctgacaaacgattcacaaacacttttctccacccacagaaacccaaatacttagactgtgccttgtggcaggggcagtagggtggctggagagagctgtcacatgcactcacttgcccagctccatggattgtttacttggcagccatagctgtcgatagttggttatacgaatggggtgtgtttggccaggatcccgtagtctcacttaggcctttcataatagtcatgacaggttctctgtggtcagggaggctgggatagaggtgggggagctggaaaaggatgggccacctctgtcctgtccatagggtgacagccacagttctccataggaaccaaacctgcaggtgtgtcagttaaccatgaaccctaagcaggaaaataatatcgccttttttagacctccgcaatttgtgtctctgcataagacaatgagttttattgcaaaggcctagttacaaaaaagcgtgtcctgtgtgacgatgactgtgactgtcccaagctgttctgcttcggtaggacagtccaaaccagaaccaggaccaggcttgcttgacaaatcctctctaaaggaacaggtggtaggaaacttctgaccctcagcgattggactcaaaacattctctggaagtgccttagacattaccctggttttacaaatgagaaaactaccactctgtccatggactgatttgtttgaggttaccaaactcttcttgcctgtctctttctctctttacatgctgttaatttgttgtggactgccagatttacatctcttcccctgacctgttgctattctagacttgtatgtttcaaaagcatctcaagcttgccatgtgcaaaatggaatccagctctttctccaagcctggccactcccagcccttccagtcccagtggatggtgtcaagtccacctagggtgctgaccccacaagttgagcctgagaatgtcttggatttctttttatccctctaccatcgaaatcatcaacttttttggccctctctgcctctggtttgtttatttatttatttatttatttatttatttatttatttatttatgttttagagattgggtctcattctgtcacccaggctggaatgcagtggcacgatcttggctcactgcagtctcgacctcctaggctcaagcgattctcccacctcagcctcctgagtagctgggactacaggcatgtgccaccatgcccagctaattttcgtattttttatagagacaaggcttcaccgtgttgcccaggctggtctcgaactcataagctgaagtgatccacccgcactggcctctcaaagtgctgggattacaggcgtgagccacagtgcccagccttctggatttattttgaacctctccacttatttctctttgtctctgctaccacctccctgatctaaaccaccaccatcctttgtgcctccagtctcttctccacacagtctccagagtggccttttaaaaacaaagctgagcatgttccccgtctcaacacccgtttatagaccatctttatatgaacagaactcaggctttgtgctggcgtccacaggctgtgtgtggtccctgtctctctcctgcaaccctgtccatcttccctcttgcccatggcacactggccatatcagcatcatttcagtgtcctttgaatgataaatatttgttgccacagagctttcaaacatagttttccacctgaaaacttctttttatccattagtttgtagcttagatgtcgcctctgttaggccttcatggattcctccatctaaaaagtcctcccatatttttctctatcattatggccagcttgttttcttgacagcatcatttatgattgtttattaattgatctggttattctctgtgccaactgctggcaggaaagggctgacatttgttttgcacccccgtaggagcgtccttttattcccagctggcttcctattactgtaccttcccctcactcctccacacttgtctccttgctgttcctcagccgtgccaggcttgctgtgccctggggcctttgtacttgctcggccttcttttaagaactttttttaaatactggtatctatgtggctgactctcattttctttagatctttactcagagtcaccttttcagtgacgctagctctggtcccagtgtctaaaactgcacctgcccctgacactccatactgaacttcttggctttatttttctcctttgtgcttctccctatccaccatatggcacattttacttatgccatttattgtctgtctccccagctagaatgacatctccatgagggcaaggagtttcttctgttctttcactgttgtatgtccagtatctcgaatagctctgggcacacaggcactctatacatggttgaatgaatgaatgaatgaatgatttcatgaacaaagtgtgtccagtcactggcacatagtgggctctccttatcctttttattgtggtgagatacagtgtatcattttaacaaattttaagagcacagttcaatgacattacatttgtattgttgtgtaaccatcaccactgtctgctccctacacttttctgaaatgaaggagtcgaggaataagcaagtaattgagtgagggactcttggcaaagcagttgtacagtgtcgatctcttgacttggaggcccagggggtcctttccattgcactgtgctctggaggaggaagggcaagaagatgagtctgagccccatctcagggtgctcgatgcatgcagcaaggaagctcagtgtttccacacgtttcaggttgcctctgttctaaatgacgagggtgctgccctgtctccccttccttctgccgtgcacacacctgctcacacaggcaccatgtgtacacatcccttcctctgcactggaggaagcacctttgcaatatttccagctcatgggatggtgtgaaagggatatgctcattctcctttgaacccttctcaccggatctccatcatgaggggactctctctgcctcccttggtgttctcatcagcacctcgtcaggtgagtattccattgatggcagggaagtgtttatttttaattctaaagtaaatcagattacatagaacacaaaatgttgtgttggatcaaaaccattgactatgaaattctcccagatggatgaaaggcgggggcttgttttcagcccttaaccacttcttctcacaagctggttaaattctacgagaagtccatccttgcgagcacttcgccatcacaggcccttcccttggggagctgtggcatctcccccacccccagcacactcacaccccccagcagacgggaacattctcatgctcactgtcactcacgtgtgtgctgtcccacgtgttctcactcatatgcactaattacacacacacacccaacctgcaggtttgcttttgacacgccaggaattacatgggagcagccagagagcccaaagtaagccttgagatgactttaacccctgtgaagcccacagggtaagacccctgctcagaccaacgtgacaggctcctgctcatcacgtgagttgccctggattcctcgatgacgttgcaatggtgtcttctcaacaaaacctcattgaggtcttgagacaggggcgcaggccaggcacatctaagtgttcgaggtcttctttgttgaattccacagcattatgtgtgcctccaggatgtgcctggcacatggttggcctggggtgtttggagaggactgggtgtaggccggaccctagaggagcttataggacagtgctggcggcagaggtgcccatacctgcgtcctgcatgatgttgcgagcgtgatacccgatctgtgcacaggaagctgcgggagcttggaggaaaagagaaccttgctctgtgggatgagaatgcaggtcaaggtcaggggagagttcagagaggcacttgccaacctgaaggtgtggagatgctgccgtgcatgggcaggaaggggagtggtggggcagagaagtcagggtgtggggtgggggcatggttccaggaagcttcctattttgtcttgtcagcagtagataggaactggattgaatcgggattatgctcacttctattgttagctctgatcatttgttgtttgacttcctgctttcccactagagatacgagtacatggcaagagatttctgaattcccacaccacaggtgtggccatggtgcacagcattgcaaggtccagggtcagtcgtcattttgctggtaaggaaggcataaactaacagcccagtagacaaatagcagtgtcccttcatgcggttgttactttgtgagagtaaagacatacaccaattggtttaatgtattcgggtagattttctactagtcgtgtccgtttaaaaaaatcaccagtcagttctctttatcggaaaaggtactagacacctgtagttgagcatgtgctgagatctggtgttttgttaattgcagtatttgatgatactggcaaaagtcactaagagaatcctcaaaacatcttgttagaaatgggaagaatattccttgactggcaaattttttttctgttcttaaaattaagcttataaatggctggaaaaattagttattttttccaggctttagttgggaagagatttttgtgtctggtgggaacgttccctctctccgttgatgcttgagaaagctacaagacgctgatggtgttggtggcagctttgccttatcggctgtcctggatgtcttggcctcagataagacacttaacccacagtgggagcatgctgctgcttttcaactgggaaacgttaccgtctgtttccatcacagtggcccatgacgaagttgaaagatgcctctgacatttgttatattataaaaatgccaagaatctcctaaagtttgactcataggtcagtttgctttcttaaaacaaaatggcaaccaatgaaagttttctggtgagtgttatcctccgaaattttaagtggatttaaataaagttcagtccgtggatgagaggattctcagtgaaattttcagtgtgcagaattactcgaggccattgagcagagtcattgctttctgtaatgttttcccataagaacacaagaatctccatcctccatcagactaatagtttttccagtccagcattttgccactgagaatggaattaagggagttgctgtgggaagaccccataacccttccagccatcacctcaaaaacgtaggagtgtgctttaaatatgtgtaactccccttaataagctattatggagcccttattcatatgattcttgaatttgtctaaattgcatttgcagcagtttttattttgggctgttaccatctggtggaacgtggcgggcagtctgaacagcagccagtcaggatttaccccatatcaccaccaaaggatctcagtcctttatccattcaattttcatgctgattcatttgattcactaagtagaattgataaatgcctacattgttcacctatgtgttgatttttggctctttgtaagggcattgctttaaatcatgttaccagtcagttcttattcttcctcttaatatgtaagaagtgcagcttcttcatattggttccaaaggcacaactcaccatattttctctttcattttctacaggggcaatcggagctgtagagcctctggttggtaacacccattgtagaatagtggggtgtgggcctcagagagactgaggttatcgctggccccattgtttactggccatgtggtctggagtgctttgctgcatctccctgggcttggcttcctcatctgcgaggtgggggtaataggtggcttctcataaaattggactcactcagactccctcagttgcaagtgatagcccaatttcagtggacttctgtgaaaggtgcagctgacctcaggtggtgctcgattccagggggtgctggggaggagctgtctctttcttcatctctcagcaggggttgtctctgtttggctttctcctaggatgtggtggcgaaatagccactggcagccctggatttatatcttaccagtgtggcaacccagccaaaagagacagcatttttctaatagaaaaattagagaaatcccatggaggtatctaagtgcttggcatggggcacagtctgttctttcctgttgcggccaagggaggagagttttctggccctgcagtggccagaagatggagtcacttttacccaaaccacatggggaaaggattccccacagaaacggaggttctcaccaggggaagtggagggaggcatttacaacagtgtgagattacaacagtggccgccctggagatgtgagggctgtgaggcaatgcaggcagagctcctcaggcagaattctgtcatgcagaattcccagtagatggaatccagcctcttttttccttccctttactgcttaaggaatgcagcttctttagattgcttctaaaggcacttccttcaaacattaagttgattctacctttaatacttttataaacttttaattctatgtcctctcaacctggatgtgttttggaaagatttattttaagaggggggttggtatggcagggggaaatttcacttaatctgctttttgtcattcagtcaaaaattacgtatggagcctctgctgcatacagaacaccccaaagtctgtgggggatggaaaggaaccatgagaagcccctttcctggggtgtctgtggcccgttggaatgtgtggtgggtcaagtgtgtagattctgtggtataaggtggaatatgggcaagtgctgttagggaggtgggaagctggagggagcccagagtggagcagagccccatccagctgggacaatacaggaggactagatggagggggtggtatctgagccaggcctgaggaggggtgtggttttataggcatagctgttgggggcagagtggggtggaaggaggagtggcccagcagaggtgagggagagggagctgacagcttcattcttgatgctcactttatgccaggctctgggcatttggacaagtaacagttcattgctctatccaaggaagaaccccatcaagtcatgggtgcccagccgaaagtctttaaggggtcgagtgagggcgtggaggaggcagccttcaactttcctgaaaggcacagagatgggatggtgaggatgaatctgtgaaatgatgatgattcctgggtttctggaggcggaggtctacaaggagggtggtgcaatggagccaggtggtggaagaccttgaatgccagagtaaggagtttggtggagattgttgaggcactagttcttcagggaaggcctcatgggtgtgtgttctgtgcagttgcccagggccccatgctcagcttaatgctatggtattgtcctcttgaaattcttaatacttttgaaacaaggggtcctgcattttcattttgcactggacttgcaaatcaaagcatgcttgggggatgatgtactttagaacagagctgtgctttagagaagaggttgggccatagttgggaggctgtttgcatccttttgaggaagggggagtaaagggcccagacgaggatgggtatgctggggatggagggaattcctctgacagcctgtggccaggcccgagcagcaggcggaggaggagccgccatcagctcttgactgggggacattcttggagctgtcctctaagtcaggcctgcaggtgacttccagggatagcgttggtgttccaaacggcaattgagaagactgtcttaatatttttactctcaacagtaagctaaagctgacattggcagtctcattcaacgaatgtgaaataaccagaaaagacattccaaggcgttctggaatcaaacagatggacggagcaaacatgttaaaaacagtaaatcacaacttgaacttcagctaatcataattgcatttctctttccttatttaattttgaaacatcttcctaagtagttttttattttggttgcttttacttaagagaccttgttattatagggcaccccagttaaagatgcctcatatatgacatctgaaccaaaaaaccttatcatttaggacatgatatcctttctgaggtttgagaagtggctattttgtctcttacaaagatttgtagggaatttactgagggaattgttgagggactagtgagcaattcttgttcacatagaaatgaacaaaactgcatttacccagtgattttcaaaaacatactcccagtaaatcaaggttgctctgaactgaacttagggtctcaaccagctgcagaccagttacatcttagcaagcagggctttgagtggtgcagtgggcagagtgtgtggctctgacctatcaggtgtgatcccctcctactgtgcactgtttcctgtctggcacagacacaggcaaagcacttttgctgaaaggacagaaagactcaaggtgaaggcagtgccatgcaggccccggatgctgtgctgagtgtcttggaactgaggaagccgctgatggccagtggggccagggcagggcttgcgaaaagattcaaggcttcattccagtcacatggacagactggtactgcttttcacattcttatcaaaaagggctgcaggcaggtacaaagaccactgcagcctttcctgtcctcatggcattgccctacaactggccacctaaaatgaccttctctgctcctgcatccttttaggaatgggtaacttggtaccattcagatgtgccatgctgaaaaaatgagagtgctttcttttgagggagttgtggaggaatacatgatgtcctatatgggaggcccataaggttagtgaggtaaaaaaaagaatcaagagtttttcttgctctgctcattcacccatagtgatggagagatttgatttcatctggatgctcgtgttccactgacagtgagtactgctcagccagtgctcgccgccaggtagttaggtgtgtcttttacaatgtttagcacagcgaatagagaaagtgcctggcagatgcttggccatctcctctgcatctcccatagtaccaagtatcttgccttgtgcacagtaggtgcttgtctgtggggcaaatagatacatttgcagttgaagtaatcctgtttctctgcctgaagtaagagacattcaccatctgtagagtgggaattgtgacttcctctagatgcagggacagttttgtaataaagcatcctcataacctcacttggccctttttggcacaaagacctgtgaaggcggagaccatgacctattttgctcagcatttatttcccagtgcaaatactcagtatttgttgaatgaataaacaaatgggatacacctgtctttcttaaattgcagaagttcattgcttaaagtagccatgtatgtcttcatcaaagtttcttcagttctcaaaatcttctcatatatgtctgtgcatacacacactcactcaacccagcagttggcatacaatggccatttggtatttgttttgcaaaagaagttagtaagtggcagtaggtaaagaaaagggcactgactgggaggtgaaagatctggacccaagtccaggtttggccacctaagcaatctggagaccttgttaaggggctgggtatcctgtctcgcccagtcagaatcttgctgtctaaatggggctaatcactgcatatcttgaaggtggtttatccagctcacaagaaagaattgatgtgcagcgcttgtcaaagttaagccttgtacatgtgtgaggactttgttcttgtcaccgatatatgctcggatccccatgtttgatgtgtggctaatgtgtatgcaccttctccctagtccaccctgagagctgagggtgtcattttacctaaataaagaaatacattgttaatgtagaaaatttagaattcacagaaaattgtaagtaacaacaattacctgcagactgtagcccagagataaccactgttaatcttgtgggatgtttctttttgtacctctcctaggcaggtactttcacatcacacacacacaaagacacggtattacttcagtcacataaccattatttttgtatcaaatttacccaagtagataacccattccaggaaaagaaagagacttaactttgttgttctgttactttctcagggcctagtgcactatgagaccgagcaggtatttgttaaatacttaatggctttctggaacatcagggctgacaagattctgagttataatctaatgttctcagttgaagtgcaggagaatgaaggcctatggagagaagcaggcccagggtcctagggctggatgtagctgagctagaactcagaaatgtgctgttgtcttgcccacgtctactctctactaataagttaagaggcacatacaagaaggcccatctggttggtgcttctagcagagaagctgattcatgcttaattttgaccacatctctaggtttgtggttactgctcagaatcaggatagcatctgggtatctcgaagctgctgtctccagtggaggctttggactgatctcacaaagttatgctgatttctacatcagcctacatctggggtccttctcctggttatcattgtttgtactgtatgcacagataccacgcccttacttaataatccagccttggtggaagtatattctcctgtgtttttgttggaatataccaaccctgtattgccctgccctgcctttcgagcatcgtgaaaagaagtccttctttctcttggtggttcttgcctcatgctctcaccctccctttttgtggtgtcttactgagccagttgttcattccccagcaaacatttcatgtttacagtcctcaactaggctatactgtggaagattcagcagatgtgcaagcccaacctttcaggatctgagtcgagagagagaggggacattatatagagaaattatagctcagtttataaagtggccagtgacccaggagagcggcagagcacaggctgtggatcctgggtggcaggaggcctttgtcatggttattgggggtatagggagctgggcaggcagggatttgaaaagaggggcattagagcttgacttggaaagggggactgggatgtgaacatttggagattgcaggagaaagcattcctggcagaggaacaagtagtagatgagaagggtcacaggtggatccctaggtgggggtagctaaggattctcaggatctggttgctcaatagcagcaagttgagttctgcacctctgcaggccatgacctgggaaaacatcacctcccaagccccccactgcctttacttgtccaatgctattggtgcaagtagcctggcaagttgatacaaccagttttcctttgggacaagggacttggtgaggggatctgtggactcctaagagccttccagtggattccaggtgatttgggaacttcctaaaattgcacagatgattttgtgtacatgtgcacctttcccccacaactttcaaagatctctgttacccttgaaagtgtaggaggaagagggtcggcatgtggattaattttaaaaccatatttaaaaaactctcaaatcatgtgaagtttgtagtggaaagctccattcagtttgaaagccttcaccattctcaggcacagctcactgatctccttagtctgtgcacccctgatgggcaagattatgtctcatccctgcccagaacttggcctcagaatcttatttgtgatgtttgttcagggaataaaatagctttgatgtggatataaatttgcatgtgtgctgacttgcaatagagtggattttttttttaattgctacctctaggatcctaaggctgactttatgtggaggagacatttccaatgtccgtcttcctgcctggtccctacctgaccctccttattaagcacagggataagccttggcatgtcctgccagcaagctgagggctggggctgtctggcctgtacttgccaaatgtagtctgagctgtcttctctctaaaggactcttcagccccatgacccccaagtatagagccagacccaaatgtgcctcttcacatgttccaaggtgggcatgcttgggaacctcatccagcccctccttgacctgaggggtctgcagcagcagcccatgctcatcttaggcagtataaggactcctgtggctgcagaaccacgaggtgggactctcctcaggggctgcttcttggtgaatctgcactctatttataatcaaaagctctgccagatggacgtgaggtgcccagcagagggtaggaacactggcagctgccttggcattttgttaagtaggtatgcaagttgctggcccatcagagagctgtaaggtgctggaatgacagagccatttgttttcccttgtgacatggtctgttttataacgtggtgggtgagatcaagggagaagagtgggccccttcatagtttttcaaagtccttttttccttttttagaaaagttcaaagaggacattgactttctacagtcacaagcatcagcctgtcttggagagacagcagctgtggcatgtagtattttaaggtgatgagccaagtcagacaagtcctgatataggtggggtctggacatcctgagtgatcattctcatctaccactcctctatctgggccattctcattcattcagtagctcatggattgtctctctatctgggccgttctctttcattcagtagctcatggattgtctgtctatctgggccattctcattcattcagtagctgatggattgtctaatatgtgctgaggagagagggaatagatgcacatggatcctaccctcagcaagctttctgaacaggaggcagtggacacaaacagctgtaattagcacaaggtagcatgaagcatcgtaagaaacttggagatgtgcgctggcatggggctggggtcagaggtggttggattgatgttcctgattcctcccttctgggatgctcgtgttttatttattttatctaaaacctgcagaacctttaccacttgtttctacctttaacatcttattgcatttatagcctctctgttcatctgtctgtccatccatccctccatccattcaccatctaacatttaccatcctaagacaggatgcagaaggaaggaagactcagtgcctgctctcagggagctcacctttgattgcttccttatggtcccatttgtgttgggggttttgttccccagcttaactgtaagttccttgaaggtcaaagactgtcttcttcagtgttcttggaagttgaaaaatctgtttggtcagtggattgctgcagctgtcgtcttgggtgtatgtgcttaacaaaaggcttaagagtgtgtgtctgcagggcacaccagccttgctgtttgcagtgctgcacagatgactctattagagtcttttggttctgatttggaaatctagagtggtgggagggtgggaagggaggtggggaaaaatacaatgtctcaatagaccaagttcccaaaagtgtatctgcacttgaggctttcctgaagaatgaaaagcttaattcgtgccttttctttatgctacttgttcttttgtcttttttttttttttttaaggaaaagatgtgtcaatttcagttgcctaattcatttttaatatgggtcagagctgccatattcacacgctttgtctcatcacacctaggcttctgttgaaatgcttgcttcacaaatgaagtttaattaatagaaatagggaagtgaacacagggctgatgaatctggggagacatgacttggtgcctgcccagagaggtccctgggtcagattcctcccgagcctgttgtcagaggcagattcttacttagggagccaggatactgggagtcaggctggggcattcatcaacaatgcatagcatagatttgcttcttagcagatgtggctggcctatttacagttagaagaattgtcattgttttagaaaactttttttgaccaaaaaataaaataaccaccaacaaaaaacccagactcttgagttgaggccaggtttgaatctcaaagcaggttgacctattttcattacagcattatcaaaacttgtgattctacctccctaacatgcttttcctggtgtcacatgaattgaacacctgattcaagcaggagagagagagtgaagaccttgtccttgtctggggcggccctgtttcccactgtgctgtggtctgaacctctttgagtaatgcctcccagagctcacctgctaatgactgtgctccacctggggaggggctattgggaggggctggtccacgcagacagggctgtacctttcacgaagtgctttcacatcccctgtttgaccttgacaacttcccagtaagggaggcagtgcctgcagtgttatccttggtccacaggggaggaaactgaagctcacacaggcaggcagggggaaggcctgggagagaactttcaacactggcataccacggggatttgtgagagcacctgcctggagtccctgcctccgagaacttcgacttctttccagatcttctgctctcttatttgatttaagtagatccaaatatggttcaggaacaaagcaggccccaaactgtgtataggatatgtgggtaatgggccagaaagctcactcctctggaaaatgttggaaagtgacctctcctgagcatcccagtgacatggctggatgccctgttgagatatgagagaaggggctgggggacaaacccatggcaagggcactagctgaaggaattcatgcagaggagaggagagggcttttccactgacgtttccttgcctctattctgtgtgtgtgtgtgtgtgtgtgtgtgtgtgtgtgtgtgtgtgtgcattcctccttggaagatgagagcttctggtctcaaggggccatgccctgtttctcagcagcctcctcatctactctcttggttttcctcattctcttcgaggtaacaagtcctcacctatttttttttttgtggcaccctacagtgtctgcagtgataagagcaggtatctttaaaaaatcaaagccaaattaatctactttggttttttaaagtccccatggtccacaaaaatatttacagggactggagattatctgctagtattctaaaactaacagtaacaacgattctttacatttttatagagagcttcaaacattttagactatctttacttctgttttcctgttattcctagtacctctccagattagacaagatgatattaaatatttccatcttacagatgagcaaattcagacttagagacgataaggtactagccccctggaaaacaactgcactgaacctaggtcctttatttctgaacaagacaggcatcgtgttgaacttcatgaagaagataatctaataattgaaaatacatcaaatacaaggacaaataagagacgctgggggggtaatgtgggagaaacctaaccttgtctgagggtaaaggcagtgtgtaggtgagacatggatgctgagttggcctttgctgggtgaagagagtcaggaagattgtccagggcgtgatgtgttcctggaaccgtggggccccatctcagtgggccttgcaagccaggatgagtgctttggtttgtttttaaagctgtgagaagccactaaagggttttaagcagaggactgatgtgggttttagaaagactgctgtggctattaggcagaaacatgtggggaggggcaagaacaaaactggagagccagagcaggcagctgttagagttattcagggaaatgttcgtgctgtagactctggggtgactgaagtgggaagattcgagaactattggggtgtagaagggacagcagctagggattatttggttgtggtagaggacaacaggtaatagagactcaggattttggcctggatgtaatggggccattttctgagttaggtaactttttacattacagggtcttctctgggacctgcgggggcctgttttgggcaggagggcaggagcatggactcattttgggacatgctgagtttgaaatgcttttaaagtatgttatgtggaaacttcaggcaggaatggggacaggtggttctggagctccaaagagagaagtgggctggaggtgcaaattccagattcattgccacaaagtgaataactggaatagtggacaggaattagaccaccaaattctgtgattctttcgtctttcccgtacttcttgaggggatttataaactcaagctcaaaataggaacctgagctttaagagagatatagccacgtttggagttggtttaacaaaggctgttctgcgggtcccagagaagaccctgtaatgtaaaaggagaatctggtaggtaattggaaccaacaaatatacttaatgttatatcccagtgatggtgatctcagaactcacggttggttgtacgaatgctggttcctggtctctgtagaattgcttccttatggctgcacattccatcaagtggttctgcccaaatttactcaattagatcttggtggtgcatttcacaataagaaataattctgaaatacactcataatggtttcaaattttagatgaattctttggattaagacctaggggtatttccttggttgtagagaacacacacttttatgactccttgttatgaaggcaacagactgtgtaaaagaactctggagttgttggggcaagagctatgtggtgtttctccctgaagccctcagagggttgtcctcctcggatttcaagggacccgctctgtgaggcacactggagtctcaggggcaagctctttttcactgactcactcaccagtgtttgctgagtgtgtctcatgccttctttcttgcttgcccctggaacatgcacaggactcagacccagccctgcttgtggcctggggctggtagatctcatgcaggtaatcacggctgaggatgagctctgctttgtgtgagttctggatgaagtctgggggagtttggagacgggagatgctccttctgcctgggggagtagagaaatgcttcccagaggttatggaaggaaattggatttgtggaggtgactgacagatctgtgccccttgtgtcagtgtctctagctgcgacagacacatgggtcagcaggcgacccttgttttccctgagagcagcaaaggccctggtgaggatgtgtccagcactacaggactggctagctgctttcttttttacctttcagttttcaaggtatgaatttttaaccagatactttctaaccttaaagtgatttggtactcccaaggaatcattctgaaagttaggaaatttatttgtgattcattgagttgaactatcaataactgtaacagattccgatctcctttgtggaaaaaaaaagtaactgtcttctcaagtacaagaatgagagaaagggtcttgattaccattttgtcctgttcaccttttttggagaacacctttaatttcttggccacaccgtgctcgtcttcattttgcacagcaccactgttgtaactcctaaaacttacgcatcacggcagatgtgtgattctttcattctttagatctgtagttttcccttatacagaagttagtgtcttctcttccaatgtatttaaacctttaatgaatatttcatcaaatgaacttcatgtcttgtatttcattattaatgttgtttatgagaccctatcctcattagcataacttacaaactaagaggaagaatgatattttaggacagtggttggtgagagaatagttgcgcatccttctacacgtgtcaaatgtgggcctttagcgagcctgcaggaaaagctgggatgctgagtatgtgtctcgcctggggtgacagatggggtgttcatgttctgtgagctctcagccgtcccgagtgtgtggctgtccctgcagcatttggacgaactcccgccaagaggaagcctgggcatgggggtgctgtgaggcaggactgagtgtatgaatcaaggtcggccttgtcctagctgggtgacataagccaaaccccttgccgactcttcagggtcattttgatcttcccgccacccagatgtcccctggttcactgatgaccccgataactaatgtgtcattttcctctatgtgcttttcttttagagacaacgtctccttctgttgcccaggctggagtgcagtggtgcagtcatggcttactgcagccttgaactcctggcctcgagtgatcctcccttctcaacctcccaaagcactgggattacaggcatgtgccattgtgcctggccttgttttggcaaaaccatatggatgtcccatctaacactccagcctctcatttcaagggcccttttcccctttggccatccacttccacttgcataccctgggcctcatggtttgggtggctgtttcagctcctgaacctctaacttagtgtgctcctcaccagccttgcccttctctctggcctgcctgctcagcatcacccagggcctgttttccctgcagacctgggctctcctccttggccaacttagatgctagacctttcacctcacctcctcaaatccctttggtccttttcatcacttctgtgcaggacatcccagccctggatggatccagctagtggtcctggccctgcctggccatccagcctcagctcatgccactgcccctgcatccactactgttctgcttcatgagctgccttctgttgctctaaggagtcaactccttcccaccttggagcttctagaccgtgtcctctccccagatggctcctccctcacttcgtctattactttaagctccacatcatcatttgtttcctaggggagcctcctctgactgcctggttgaggtcaggcttgtcgtccagcctatacttaggattgtcacttactgtttgtgtgcttatctgttcaacacctggcccagggttgtatagggcagacctagtttcagaccttctgttccttcatgcccatgaaatgtcccagaaatcctattgccttggcatccaaatgccattgcccagactgtctcctatagtcagaaacagctcagaaagcttttatcagcatgagtgtcctagtttttggttcacaaaacaactgtggtcatcacagttctaattcctgttggttggttggagagtcagtacagagtattagctttgggccagattccttgagttaaatccttgccacttataactaggtgagcctgggcggccgggcaccctctcgtttcctcatgtagaaggtgatcatggtgcccacatcctggcattgccgagaggatcgagtgagcgggcataggtacttctctacactgagaagcactgagcacttggtgagcatccggaaacatctgctgctgttagtgtgggctgagctctgtccgctgtgggctacagaaggccctactgcctgtcctgcatttttctcttatgtatgggctttcagtaaacatgtttggattgaaatacacatttgaggaggcactggacccagacctttgagcctgtgattccaaaccctttcctcctgtgcagttgcagctcacttcccacatcactcagtcctgcctctaagcgacactacactgtcaccttccttcatcatcactgttggcgctttcacataagcaagggccccatgtatttttctcttattctctctgtctggaatactctaattctttccttgaatccaatgttctgttcacctcctcctttatatttttaattttttgttttatttatttatttagttttgagacagagtctcactctgttgccaaggctggaatgcagtggcatgaccttggctcactgtgacctccgcctcctgggttcaagtgattctcctgcttcagcctcccgagtagctgggactacaggcatgcaccaccacgccccgctaattttttgaatttttagtagagacggagttttgccatgttgcccaggctggtcttgaactcctgagctcaggcaattcgcccaccttggtgtcccaaagtgctgggattacaggggtgagccaccacacccagcccacctcctcttttaataccagcttcacaaacatccttcaggatatgtctccggactctgagcctgtgtgttgctctctgtccactcaatgctgtgtcgatttgccctagtaattggcaattataattctaagattataaactacagtatcaaaggtaagagcaatgtttcctctcccaggaactacacaaagcgtagaagaactcagtatttcctaggccttcaggaaaagcttgttgactaaaagaaataaccagttgacctggttttggtgtccgtttatttttgcgtggatatgaggtgtaccctgggatccttgttaaatctcatgttactcagcttgttttgtcaccagtgttgggcaaaactgggtgacaggctctccaccttctctgcccctttcttttctttccctgcttttccaggaacaccttgattcttctgtacgctagggtgtcatttctctcgttccttcagcagttcaatgagagttcctgagcactgcctacagtgtgacaggtgctcatctgagcgtgaggagcagcagtgaaccaaataggcagggctcctgttctggtggagctatgttctagtgggaagagaggtgataaaggaatatgtccacgacataggtggtgcttcgattctagcagggaagacttatgttgattggccaggaaagacgtctttaatgaggtgccatgtaggcagggatctgaaagaagtgaagggagcaagctgtgaggatagccagggcagaggggatgggcacccagcctggctgagagtgtgtgtgtgtgggggaaggagatgtttttaattggaatggagtaggggtgaaaggaggagctggaggcatcagaacatagaaggccttctaggaaccccctaaaagggccttggatgttactccgaattagatggagagctgtttgaaggtttttgggagcaggggacattatctgatttgtctaatgtcaccttaggtctctcatgagcttaaggaaatattaactcattcataggaggagggaagtaacttctgttttaaggagggacacttgcctaattcctctttgagtaaggcctaatctgtcagagtcgtggttggactgtgttctgaactgtagcatcccagggcctgaccctagttctgtttttttttttttagatggagttttgctcttgttgcccaggctggagtgcaatggcacaacctcagctcactgcaacctccgcctcctgggttcaagcgattctcctgcctcagcctcccaggtgcctgccaccacgcccagctaattttttgtatttttagtagagacggggttttgccatgttggcccggttggtcttgaactcctgacctcaggtgatctgtccgcctcagcctctcaaagtgctgggattacaggtgtgagccactgcgcctggccaatcctagttcttttactctcttgcttttgctcagcctgtaagtaggagtaggaagtttcaaaagttacaataattaacatattcacgcctttttcacggtctgggggagctaaagcaggtgcaggataaatgaaggaactgaaccagctaggaccaaaatcagtaatttgaaccaaacttgatagctactgttttgaaactgtcattcctacctataggtagataagggcaagagattataaaatctgatggccacgaatctaattttatgagacagtgtaatgataaaaggaatgagggaggctgataaatacagatctgtatgtcttccagttttagccagcttgtcttgtttctgagtttcttgagtttcttccctgggaattgttttaggcccaaatggtaagcaaaaggaatatggtgtaagtggaattaaataactccccccagcacctcctactttctctcctcagatgtgtgagtggtaaatactttggaagaaatacaccccaagcctggtgtgttcactctgctcccaaaggtgcttgggcagttggtggtgatgggagtgttggttgattgtagctctgtatatgagggtgtctgaggattgtaaaattatcaggaaatccctcttggtgttgaagtcatgagcaggtgcaggagaggtgaaaggaaagggcagtgggtattcttccccctcaaagtgtgggaagagcagtgctccaaggccacccaaggagctgggattttttccttctaagctggttttccctttctccccactcccaactagcacgtgggcagaaggaagtgctttatctgcctgctacagggctgggaaatgtggcccgtgtactgcctcagtgcttgggtcaccagcggagatggctgcagtcccagccagctctgcaggagcttcagtcagaaacgctgatgttaggatgcattcttcagggagctgcagcttttcttagaaggtggaaaaagagaaagaagtgagtaaggtgaagtcttagaagaaggaacaacagaaaccaagttcagtgacagcccaccaggcctggcagagtctgacaaggagtctgtgaggtagggagtgtgcacgtgtgtccgtgtgtgtaaaggctaatggaatgggagacgcccttgaacagaaaggctttcacccataagtgtgaagtctggttcgtcttagcgacaaaagttagaaaaccactttcagacaataattgtattattttacagcattcgaagcaacctgagttggtctcaaaggtggctccctcaggccttacctgaggatggggacagagttgctcaaatgctttgggattactgagactagagtcaggataagctcgatcccaggttcctcaggccatgcttttccactagccaattcagtcccttcagcaagtgtttgtcgagcacttactagatagcaggtactgctcttggcacttagagatatttggtgaaaaggtcagcctggagcttccattctactcaggagacaaatgagtaaatacaggaggtgatttagagagcacctgcctcctgtaggaaagaaagggaggttatgcaacagcacctggtaagggtggtcagggaaggccatgtggggctctgggacagaattttccaggcggaaggaagatacagaggcttcaaggcagaaagaaacatcattgtggagtaatggcaggtggctgatcccactctctgcatgcagaaaagagcagcagccttcttgaagccttcttacctttctcacgttagtacaattccacacccttgtgtgtatgtggcagccactgtcataggcatcagggatcctgcttttcttccccttgaccaagatgtgaagatttgtgatcagagcatcagaaataaagtcccttgagacttgcagattgaggaaaaaatgacaggagtcacccagatatgaaaatcagatcttgaattcgtctattgatcaggcattaggcatggtgggagttcagtccgtttcagctttaatgtcctgttgttttgctattgatttctttcctcaggtttcaattggtattttttccatgttgtctatacattggtcatctattttagtgatgctaattgtttagctattaaaatggtgcattagtcccacacaactcttataaacagctgtgtagtaaggagtataatctttgtatctgtagtcccccttagggttaataattaggtttttgacagccagctcagccggcttgttttcacagtgccctgtttcccactggagaatgcaaggatgcagtcacgggaggaccaggtggacagcatttggaggatttgggtggatctaagaatattttcatttggaagaacaggatggacaccagaggccaaaccaaggagtagaggaaaacatggcacctttcccccatcccacccctggaactttcacccacagtatagggttgccttgaagctctggattaccatggagctttcaatgagtaggaggagacatccatttgtcctctgtctccagctggccccgggaactattcaacatctgggattgcttcctgcggtgccccctgacccaactcaccagagtctaccgactctagacccactgttgtcctgggcccctgcctgactcttttacccactccaggatgaccctggtttctactgacacctgcctgacctaactcggtttgtctagaatgcagttgaagttgcagcaagggagatgaggaagggtaagaattggtgaaaaaaattacaaaggtttttcatggttcctaccctcgatgagtttacagtctagtcttcatgaggacatgtgctcatttgatcataaggcattttgtgacatgtgcctggaggtgattcagacagatgggcagggcaggagggaatgctggggtgtgtatagcaaaatgtgttattaaattatggcatctgttgtcaacaaccggtttagaccttcttgatctcctggggtttcttttcagttacagaattctgtcatcattacagaaacaaggcttagccacttactgctttaaataccaaaaagagatggcgaataagattgggatccatggggctttgagaacctagtagcgtgtgtgctgtatcacagttctcttctggctgatactggagagggccatgcaatgctggggacggacagctgtactagggagtctggattcgaattctggacatccctaggctcactgtgtgaccttcatcccccctccccccactccctgtaccctttgagtgcccctgccttcttactctgcatgtgtgtgcatgtgcatgtgtacccatgagtgtgaggaaggataactccagtgttgggggagagtctgccaggagataggtgccctgagtagtggtcttctcttgggcacttaccgactgtgtcattttggaaaatggccccccccaaaagatttccacatcctaatctcttgaacctgtgagtatgttaccttacatggcaaaagggatgttgcagatgtgattaacttcagaatcttgagatggaaagattactctggatttagatgggcctacccaatccttacaagagggaggcaagagttagccggagaaggagctgcagtgatggaagcgcagaagtcaagagtgatgtaatcacgagccaaggaatgtgggcagccttagaagctggaaaaggcaaggaaacaggttcagccctagagcctccagaggagcacagtcctgctgacatcctaattttagttcagcaagacccatttctgccatctgaccttcagaactgtaagatactaagtttgtgttgttttaagctactaaattatagtaacttgttatagaagcaatgggaaacatacatcaattattcctctggatattagttgcttcagctctaaaatggggacacaaaatgttttctgcctgaaggctgagaactggaccatgtgacttttggcattccttcaagttctagatttcatgagagagaaaatcgacctgaaaatgcattaaatgtttaaaaacatagggaagaaagaaatatacaattatttaatgtctgtgtatgtcatttaattcttacaaccacctgagagagattttataattattattttcttttagtcattcaagtatttgagtgcctatatgtgccagatggtgttctaggtgttagaaataaagcagtgaacaagaccaataaaaatctcctgtctttttgaagcttatctttagggagacagatgagaaaccataagcataattgctaagtgaatcatcagctaggttggcaattgatagctgggatggaagaaaattagagcaggttgatgggagcatgttactgactaggattgcaggagctcagagggtgagcagtttgctcaagaccacagcaccaggaggtagtggagtggggatgaaacccaaaatctgttggaatccagaggcctggtctgatccttttctcaggctagtagaaggctctgcctgactttgcctatttggattcccccactttactgagggagaggagtccccactgccagctgttgttaggacaattgctatcatcctgggtttcatatttttagctcctttcccatctctctaataagtaaatgccagagggctagggctaggctgatgctgggaatgagacgaggaacacagacggcacaggtcgcttcatgagttccagaggcttgtacaggagacacatgggccggccactgtttcctgtctctctgagggagctgcaactccagcctttcatctcacaactcaagttgcttttgctgcagctgaggcctgaatgtgcatttgtaactctggggaaaagggtgttcagttatcaacaattactattaggttggtgcaaaagtaactgcagattttgccactacaagtaactgtaaaaactgcaattacttttgcgcctacctgatatttttatgttgcatggccttttcctggcagtttgatgtttatcatttcctgtcattgaggaatgtgtttttctaggacagtatgaaggctttcaggatctttagagggaagctctaaaatgtgcttctctctccattaggttggctcatcagtcagattctgatttgaaaatgaagggtgcttggcagtaagaatagtggaagtaaattttcaatattatacattaacaagtcataactaataacttttatgggttcttcccatctcagatttcagagaatatttttgggttgtgttctattgatgagggcttaaagaaatgccttgttctggctgggcatggtggctcaggcttgtaatcccagcactttaggaggcccaggagggcagatcacttgaggccaggagcttgagaccagcctaaccaacatggcacaacaccgtctctactaaaaaaaaaaaaacccaaaaattagtttgggcatggtggctcatgcctgaaatcccagctactcgggaggctgaggcaggagaatcgcttgaacccaggaggcagaggtcgtagtgaactgagattgcaccactgcactccaacctgggcaacagagtgagaatctcatctccagaaaaaaaaaaaaaaagaaaaccaaagcaaagccttgtcctgttgtgcttggtttgaaactgccattccctttagtttctgcttactgctacttctacacaaggtcaagagaaagcctggcttcagaagaattacatagtcaacccctggggctagctagctgcagaagaacttgaacttttggttaattaatggaggctgggccatagctggcaaagcgggatgtgcccatgcctgggtgttgagagactgggtcttgacatggctctgcaactgtccatgtcatcttggaagatctttctgagttgggacagctgagaaacttcatgccatttgacagttttcttgaggtcatgagcaaattaaccaatcaaggaagtaaataagtaagttttggtggaacaaatttgtatgttattggtgtgcctttttttttttaataccataggtgtgttcctgatgaaaagggtgtgaataaatggaatttaaaatagttttccaatgaacggaatctttcacatgttaatatatcagggtcttctgcagtgacagctttgcctgaatttcatttttcacattagcttaaaaatattttaaagtaaaacatgttaattttgaaacatataggaaccagataaaggcaatatgttttttataaaatggaatcatatcctatcattggacttttggctgttttcctcttttaaccactataaaccatgttgcattgagcatcttggggtagcaaaatcacagattcctgattatttctttagaataaactcttagccttgaaattgctgcattgaagcatatacaggattttttttatatgagtcgcaaagttatttgctttgcttttgctttttgaaagagataaaagcttagacatcttgacattaaaaaaaacaaaagggttaatagcccagactttaaagtcagacatacctgaatttgagtcctggctccaccataacaagctgtgagaccctgacaatttacttcccatctctaagcctcagttttctcatttataaaatgggcataatatccttaaactcactgtgagcattaattgaatgacacgatataagtaaaacaccataccgtacatgaattctctatatgggaattcttactaatttgtacctgaacctctccttattcactagaagagtgtgaaaacttagtttcctctctgctccacccacggctttctagcagtcactgtaggcccaaggaaacccaccaccgtcttggtgcactgtaaccagggttgaggtgtctgtcctaattttgaaagcctgccttcagacatttatatgttcagacaaactaatcaggctgaaatttctcatgcttatttgcagctagatgaagcaatccatttagttgctttggaattacccaagcatggaagaaattggtttctcagccttgagatattctgcagatactgaagtacagatggcaccagggccagcttggtaaaaccagaaacaaggggcctgagtttggccctttgtcagggcctctgtccttgggaactggtggttccacctgggccccaacataagcctcagcttttcatttggccagcatgtatcatgaagttacttcttatttcaccctttgggggactctcagctgctcagagcttttgtgttttctcttttcagcttcctcctcaattgatacggatgaagtatttgctgaatctgtttctctttcctgaatcagaggcccagaggcattcatatagttgctttctggtaaaaccttgctgatctggtatttgggctgtcattagactgtagtgcaaaaagacgaggtgaattttgggactccagatttcagagtgtataatatctcttgtagttaatattcacaacccatgagataggaacagacagggaaactgagataccaaaagtaatgtgcccaaagacgtgcagctagtaaatggcagaactgggatttgaattcttgctgactatggttccatttcaactattactcaataccaccttttaatctgcttattataatgtatttcataactttctatgctgtggtattgatcattcattcatcagttacacaattattgcatggaaggatacaaagagaaaaagatatggcaatgtggtccttgttcttagggaattttcataaggtattaacaggagaagcaacaagataactatagatcataatataaaaatacctcccctctttgttagatagctttaacccccctgttcgctgaaggacttggttctgaatgattgaaacagataatcctccgtgattcccgtacatgtcctctgtgcccacctcccactccagcggtgagtccattgtgtttttcctttattggcaaccctaacgtgttggggcaccctctctaactccacagtacgttgtaagtttggtgttaggagagaaatgatctcaggcctgcacagcacactctttttctgttccctgccttttaaggtcatgccctcttgtcatgaatataagaatgcctgtgcccccttcggagaccggtgccactttcaggctgtgtgcatgctcactgcccctccatcctccttgagaaccatcgatgtgcacagagggttgtactgtttctctgtacatcccatcagcatggcttactcaagctttgcttcctgtcatatgtactaaggttttcaatgtgaaaatatgaaattacattctcatactaaataggctcctttaatccacactcctctctgagaaccaatccactttaccaagatctacccctcttggggctgtgctccctggttaagaacagctggtttagtagcaagggagaaggcaggagatgatttaaaacagaccctgggattctaaaagtcctgggattttataattcctgggattctaaaattagctgggaagattttgagtagcggaaaagagcctgccaactttagccatcctggataataccattctgttttagcttgatcactaatttttctgaccccatgtagaaaacgtatgtaaatcatggtggtggtagcagcagtagtagtaacaacaataatgataataatcatggcagtagctcccctttttttattttttattttttgagacggagtctcactctgtcacccaggctagagtgcagaggcacgatctcagcttgtcttggctcactgcaacctccacctcctgggtccaagcgattcccctgcctcagcttctagagtagctgggattacaggtgcccgctaccatgtctggctagtttttgtatttttagtagggacggggtttcaccaggttggccaggctggtcttgaactcctgacctcaggtaatcggcccgcctcagcctcccaaagtgctgggattacaggcacgagccaccacacccagcctgtgttagattagtgttagagtcaccttattgatctgtcaacactaggtcttatttcttcaatctatttgtacccattaagaagcctttcctcattctcccctctcctcacccttcctggtctctgataactaccattctactctctatcttcatgagagccacttttttagctcctacatataagtgagaatgtgatatttgtcattctgtgcttggcttatttcagttaacataatgaccctggttccatccaagtggctgcaagtgacagggtttcattctttttatggcagcataatattccattgtgtatatatgccacactttcattatctcttcatccattgatgggcacttaacttgattctgtatttgactcttgtgaataatgctgcaataaacatgggaatttagatatctctttgatatattgatttcctttctgttggctgtatactcagttgtggaattgctggatcatatgatagttctatttttagttttttggggaacccccatacagttttccatagtgctgtattaatttatatgcccactaacagtgtgtgagggttcccctttctccatatccttaccagcatctgttattccctgtatttttgataaaagtcattttaactggggtgaggtggtatctcatggttttgatttgcatttctctgatgattagtgatgctgagcatttcttcatataacctgttggccgtttgtcttcttttgagaaacatctatacagatcttttgcccattttttaaattgggcttttttttccccctattgagttgtctgagctccttatatattctggttattaatcccttgtcagatggatactttgcaaatgttttctcccattctgtgcattacctattcactttgttgactgtttcctttgccgtgcagtggtgcagctttgctgagctatttctctccagcggacgaagttgtccctcttggagagtgagatgcagttgcgtcacaggatgttgtcatatgctgggcatgtggcacaggtgaggtccctagagccgtgaaggccaggagggctggttgggaagcatagacctacatagcatgaaactgtgctcttcattttggttttgcatctgcggctttctgagagacctgagctgacacatggaacagatatggttctcccttgagaaattgttccaaatattttgatgtacttcagccagtcactgaaactctttagagtgggaataatgctcatgcttgccttgaacagcagtggcacagagtgattgaaagcctgagctttgaagccagactgctggggtttgaatcgcacctcggatattaactgctttaccttgggcaagttttgtaacctctttgtgcctcggatttctcatctgtaaaatgagacataataagaaatgtaccccttggggttgttgtgagaatgaaatgactttctacctttaaagcacgtagaacagttcctgggacctagtatatatagatggtattacactgtgaaatcatttgattctctaaatcaaatgagaatgcttcataaattgcaaaataccactcagtactcttagcgacagagggagaaaaaatggaatattgtgttggaagctatagtttataatcccacttcatgtggcagcaataaaactggcaagttattgatggggagcccacaaacatgacaggctccccagaacaatgatgcctcatctgtgcatgaatacccctggggaacttcaaaatccatatcctatggttgatttccagattcactgaattagaattttgcagggatacggggtactcaggaaggttttgtttattttttacagaaagatttccaggtaatcctaatgcagctgatgtatggactggtgtttggtaacttctgacctggatgctctaacagttggttatatttaatgggatgcaggaagatttagtagagggcctgacagcaggtatctacatttacataaattttcattaggtaatgcggatggagcaacacaggcagatttgtctggaggaaattctagacatctaaagacacctaaatcctggggctgagagtatggctctatttcttattgaggtcagttttcactggctgactgattcccttaccatgaagcacaaggttgatgggtactcttaattgtgtgaaaagtgggaagtgggaatagttgcaaagggagttggaagtaggcagttttgaatcctggcttgcctgctgcatactggatggaagctgcagatggaggaaacagtgcagaagactcactgagcaggcatttggatgactggccagcagatggggagtggagctcagtagatagccattctgcactcttcaggagagaagaacaacctggggccatgtgttcaataaagagatggggctggcacattgttgaggaggagaaggaggatttcaaatggagggctttttgaagaaggcattgaacacctccccacccacccctgccctgcacttctccctgtagctcagaaaccttttaatagccatgggaccaacatctagcagctggcttggttttgctggtccttgctttaaaatggggatacatatccctgctttacagacctgctgtggagttggatgaaatggtggatatgaaagtgccttaactgtaaagtgctgtacatacttacagaagcattggctaccatgtggagatggcgtgccccttggtattagtaggaggggacagactctgaccctctaccaggggtaaagccccaaatctaaagatctagaaacattagcaccttcatttcaaggtctgatatgtaagaggatggacattcctaagatttattgtgggcagagtagcatgctcacccctgatggtgacagtatccgtagtgggttctcactgtgggctgttgcatttaggccactggttatgcctgcttcccagagctcacatgtaactccattcctttctcctctactcaagaaggtgcacttatgtgtgtatgaaacagggacattattaaaaaggtaacctgaatctacctaattaaaagcacaataaattcaataggttattcagatttccatactgtactgttagaaataaatgacattcacacactgcatagcagttgtgaaggtgagaaccgcgactgtgggtagggagatcctccagacatcagcaattcccatgtagtgtgagaccaccgtggagggctcctttgtgtgtctggcaccgtgggaagttcttagggggacaaatgaggtatcattttctggcccctcaaagtactttcatctttccaggaatgtgtaattatgtgcccaaatgagtggaaggctcctaggttctgtagttgttcagagaaagaagggactcgaactaattgaagtgattgaatgagcagcacactgaaagctagctgtcaaatctgtaattataacttctgtgcagtgcatttgacattttacagcatttctataaggataatgaattctgatgccttcagaagccagataggtaacaaaaatcagggaagcagttaggaagactacacttggatggttagtattgtggtgaaccagaatgcgtgtggcccacctttaagacatggcgatccaaaatttaaaacagaagcatagcacagcacttctgattttcaaagaacttttacgaatgtcctgtttcatgttcacagcatcctatgatgcaggtctgttctccccttccagagataagaacacttaccaagatcagtaaaggtggagatagcatgtgacctggagactgcaatgccagtgctcagagctgtgagatgctttccctagaggccctgggtcccaggaccaagcccttggggaaagaaggtatcatgctttcctgaagtgtctgccctctccccagagcttccctagttattctctgagcacagctctggggagatgggcctctggacctgtttgtttctactgttaccccgtgacttaaatgggcccaggaggcaaagactaggaaacaccaagaaggctggtgtgggaattgaagaaaaccatcaactgtgtcaacagactggacccaataataggaacaaagtgctgaaatcagctttgcagtcacatttagttggctgacctgtgatttctcaactgtctcttttttatcttttaaccatccatgtcatttttcactgaaagaaaaagagaaatgcagagatccagatggagtcccttgaacccttgagccaaagtacagaaacccctgcactgtggctggatgcccctgaaggagggaggccatgtcagttacgattaatgtgagcagcttctctcattccagaaatgtgacctctggttacagcaaatgtgacaacatgaattaccttcaattatggtgaactacgtttaactacatgattgcctccacaccttggtgggaactggctgctttgatagccttgaccatggaagaaaaagacagtagaaaagacttggaaatgacaggcacctagaatctgagtcaagggtacagtggcaggccaagggctgtgggctttctgtattatcagtaaatgtgatatgtggtttgggctttgattcccaccagtgcttgagaaagggatagttacccactttattgagctaaaatttacttaaaacatatgcctttaagtatatattttacagatggatgttttgataagtatatacactctgtaactaccaacccactcaagatgcagaacactgctatcaccataagggtcccttgtgccctatctagtcagtcctcacccccaattcctgacccaggcaaacactgatctgctttttactactatagattagattcatctttttactattacaagttatattcacgtttcataagtgaaatgatatagaatgtaatcttctgtgtgcatcacaagtttgtcctttttatggctgtatagtagtccattgtatggatataccacaatttgtttatccctgtacctgctgttggacattagagtctaaacattggaaacattgttttggctatgaaaaataaccaggttttggctattacaaataaagtggctatgaacattttatataggtgtttgtgtacacacatatatgcttttattacccttgggaaaaatagcaaagactgcagttgctgggccatattgtatgtaggtggggttttggccctcattatttttgatgctccctggtgatacacctgtgaacgtattatgttacagggcaaaagggactgactgtgcagatggaattaagcttgctgatcaactgactttaagataggaaaattaccctggaagtgggcaagcccagggttatcacatggacccttaaaatcagaaagggagggcataagccaatcagagagacatggtagaaggagaggtcagacttaaagagtgagaactcaacctgctgactttgaagacagggaaaggaggccatgagccaggcattgctgatgtcttctagaaggtgagaaggacccccagctgtgacagcaagagtggggacctgtcttatgtaactaaattctgccagcaacccgaattagtctgaaagtggattctcccccagagaataagagtccagacttatagttttagcttttgcatgtagctctatgattcattttgagataattttatataaggtatctgtgaagtaagagttgaagttcactccttaacctgaatatccagttgttctagcatcatttgttgaaaaactatgcttgttgaataactttggctcctttgtgaaataaattatgtatgtgtgtttatttcggaactttctattctttcctattggactgtatgtctcttcatacaccaatcccactatgtcttgattaatgtagctttatggtgtatctggaaatcaggtagtataagttctccagttttacattaggttctttgtatttccatataaatttaataattggcttgtcaatttctataaaaatagccctgtttagattttgattgggattacactgaatctatatctcaatgtagggagaattgacattttaatatcaagtcttctgtccatgaacatgtatatttctcataatttatttagatttgatttaatttttttcaataatgttttgtggttttcagtttcaaatgttttgcataattttctaaatgcatccctatatcatttgtttctgatgttattgtaaatggtatttatttcaattttcatttgtttattgctaggatatagaattaaaagcagcttttgtatattgactctgtatcccataaccttgtaaactcatttcttagttactttttcggtgaattcattaggattttagacatatagatcatgtcatttgtgaacaaagatagttttccttctcccgttataatcggtaagcctttaatttctttttcctgccttattacattatttgaaacctctattacgatgtggaataggagtagtgacaatggaatccttgtcttgtttgtgatcttaggggaaagcactcatttcttcaccgttaagtatgatgctagctgtgggtttgttgctgatgtcctttattaggttgaagaagtttctttctatttctatttctcaggagcttttaccatgagtagttatggaattttataacactcttttaacgtatctattagaatggtcatatggttttcttttttattccactaatatagtaaatagcattaattgatttttaaatgctaaaaccaccttgctttcttaggataaacatcacttgattgtggtgatggtgccttatccttttgatatattattgaatttaatttgctgttattttgtaagaatttttatgtctgtgtacatgagggatattggtttatagttttctttctttaaatgtctggtattgttggcttcataaaataagctgaaaagtgtgccttcttcctctgctttctaagagactttgtgtaggattagtattatcccttaaatgtttgacagaatttaccagtgaaatggagtctggagttctctttgtggaaagatttcaagttaagaattcaagttattaggccgggcgctgtggctcacgcctgtaatcccaacactttgggaggccaaggcaggcagatcatgaggtcaggagataaagaccatcctggctaacatggtgaaaccccatctctactaaaaatacaaaaaattagctgggcacggtggtgggcacctgtagtcccagctacttgggagactgaggcagaagaatggcgtgatcctgggaggcagagcttgcagtgagccgagattgcgccactgcactccagcctggatgacagagcaagactctacctcaaaaaaaaaaaaaaaaaaaaaaacttcaagttattaaatagatataggactactcagattttctgtttctcttcatctgagctttggtagcttgtatcttggaaggaattttccaatttcatctaaggcatcaaatttattggcataaaattattcataatatttcctgattatattttcaaagtctataggtattctagtaattgtctttcttttatttctgataccagtaattcatttcctccttttctgcgatcagtctagctggaaatttctaagagtcgttgatgttgaaaaaaccacctttttcttcccttgatttttctctattgtttgcctattttcagtttcatttacttttgcgcttgccgttgttttttccttctttctactattttggatttaatttggtaatcttttctgtggtagaaggttgcacaattgattctagatcttttctaatatcggaatattggctatacatttccctctaagtactgagttacctatgctcagtttttttggtatgttgcatattatttcactcaaatgttgaaaatattttatttatcttctttgacccttggattatttagaaatgtgtttgtaaatttctacatatttgggttttgaccaacatcaaaaggtcaatcattgacttttaattccattatgatcagggaatgttctttgtattcttttaaacattttcaatgtattaatgcttgttttgtggcccagcatattgtctatcttggtagatattccatattaactggaaaatcatgtttattgggctgttaatgggtagaatgttttataaatgccaggttctataaatttaaccaagctgattgatagtgctattcttttgtatacatactgattttctttctacttgttttatcagttatgagagaggaatgttgaagttcccaactatacttgtggattgatttatcttttcagttgtgtcagtttttgcctcatatattttgaagctttgctcctggatgaattcacatttagggttgttatgtttccttgatgaactgatgactttatcattatgaaatgttcctctttctccctgttgatgttctttgttctgaaatttattttgtccaatattaaggtacacctaccttggaaagaccagttttagttgggctttattgttcactatgacaactctgtcttccagttgaagtgtttgtgtcatttatgtttgggttttaagtctaccatcttggtacttattttctattttttccatctatttgttgttccttttcccctttttctgccttcttttagtataattgaatattctttgacattccattttatttctactcttgccacataagctatatctattttatatgtgtcttctctgtatacgtgtatttaccatttatagggctcttcatttctttgcatagattcacatttccatttggtgtcattttccttccatttgaggactttgctttaacttttctgtagtgtatttctgttggcagtgaatcctctcagcttttgtttgttgaataaacttcattttactctcatttgggaagatattttcactggatatagaattttggattgacagtttttcttgcagcactttaaagatgccattctatcgtcttctggcttgcaaagtcagaactttcttttggccaggaactgtggctcatgcctgcaatcccagcactttaggaggctgaggtaggaggattgcttgaggctaggagctcaagaccagcctagcacaggcaacgtagcaagaccccatctcaacaaaaagtttaaaaaattggctggggatggtggcatgtgcctgtaataccagatgctctggaggctgaagcaggaggattgcttaagtccaggagttggaggctgcagttgagtcatgattgcaccactgcactccagcctgggcaacagagattgagaccttgtctcaaaacaaaacaaaacttttctttgattctgtgtacataatgtacacataaggtttttttcttcatttgatttcaagattttttcttgatatcagtttttgggtacttgattttagtgagaggttttctttgtttattcacctctggatttattgagcttcttggttatgtgggttatagtctttatatttattaatttttcaatcattattattttttgcttctacccctctgcccagaacttcgattacatgtattaacccagttgatcttgttcataagtcattgagtttctgttcatcattttaaaaaccaatctttaattaattttggataatgtaaatgtagccatgttcattaatcttttcttctgtagtgtctagttcaaggataagcaaatttttttctataaaagatcagatagtaaatattttatgctttgtggaccagatggtctgttacaatcacacaactctcctaatgtatcacaaacacatgcatagacaatacaccaaaaaatgagtgtgccagtaaaactttatttatgacaacaagctacggtctgggattaggtctatcggccatagtttgctgaactctggtctagtccactgttaattccatcacatgtgaatttttaattttaaacatcttcatttctagaaatttcatttgatttaaaaaaatatttgatatttcctctttcattatgcatgtttttaaaaatacttgaataaaattatgatagctgattgaaaatccttgattgctaattctattacctcctcatttctaagtctgtttctgtttagtaattttccaaaaactgcttatgggtcctattttcctttttcatgacaattctagtaatttttgattgaatgctgggtattgtaaaaattatattgtggagcatctgaattttcttcctttaaagaatgtgtaatttgttacggttgacagtcaagttacttgttgctcatagtgatcctttcaaagactgtctttaagcgttgttagggtgggtttaggatcaccttttagggtctctgcctaaaccccaagggatcaacaacatcttttgactctgatagttggaaaatcaaatgaatgctaaccctatgcgaatgctgggatctgttcagctcacagtttcagagttgctttttgcttagcctcatggagttttgtcctcacatctatgacttagtattcagcaaagactggagggtttccctcttcagatttctggattctttgccctgcagtgtctagccacctcagactccctacattccagactgtttcctcagctcagtgagacctttgtgttctgcttggcgcccccactctctgcttcacgtttcagaatgaacctccaggcagaaagctggggcagtcgtgaagctcacttggtttgagagaagggagcccatctctcaggcattacagtcttcactgtctgtcgttgaatactagaaatatttgttttatatttttccccagttttcaagttgtttaaggcaggaggataaatttggtccattttatttcatcattgccagaagtagaaggcagtcgtcacctttttaaaggtgatcatttataaacaggccgaaaaatgcagttctgtaggattaaagggaaatttcagtttgagtttttaaaagtgagacagttaataggttatgtaggtaagagggcactttgcttctgtgcaaacaccacagagtatgctgctgagttgctctgattaaccctaaatttgtgaatttaagcttataaattaaattctctataatgtatttatcaagtgccaggacagagctattatggtttttctatgctttgcattggcttctgcaaattaagtttcatttcccttttgaccacaaagaagatggccctattcaagacttcctcgttcataatgcctcagtttgttatccctccctcttccctcttcttcctgtacttcctgcttctcagtaatgatagttgttcttgtgatctagtagagtggaaagagcgtagtatctgaataagaaaccagacgttgtaattctggagccacatctgactctgtgacttgggatgagacactccagccctcagcatctgcttcatattccttatttatataattggcacggccatctgtgtgtgtgtgtgtgtgtgtatggattcaaatattttaaaaaggatgtgagaactctttggaaaccataatacatgctgtgagtgtaaggtgtttttgaggtcactgtgaatttcctcactgagactcaacctaacaatggaaatgtcttcttgtcccactaaacgctcctgcagaaatacccagcttctgcttggattgagaactgtcactttctgacacttcttccttatattgtattgatacaaggtttcgggcagtttctgctttttgtgatagctgtgctgttggatctcacacttgctctatcaatctgtatctgtaaccaggagacagaaatcacgtagtaatttgaataactaaagttcaatataagaaattattaaccatagtggaattggagtaatgaaggattggctagtaagaagtagaactctaaagaagataggaatagataataagatacagctaggtgtgctggcgcatacctgtagtgccagctactaggaggccaaggtgggagggtcacttgagcctaggagttcaagaccagcctaggcaacatagtgaagcccccaactcaaaaaaaaaaaaaaaaagagagacaagaaagtacccttagggctgagatagagcacttgaggaagacatcgtcccggggctgagatccagatcttgttgcacagagcttgactgtggttcactgaatggcatagaaattgtttttgtgtcatgaggatggtggggaagtctctctggtcctgtgctggtagaacttgctggaaacctatcctctggaatttgccagaaatccgccctctagggtgccaagggaagatgtgggagatatctcactggaggcgctccatttagaaactccccgaggtgtaggaggtggggatgctggagaaagtgctggccagtgggtgctgttgtccacaggcactgtaggagctggccctggagaaggcaggtacactgcaggagtgtgctgagtgagcacagtacaaccaggaacaaaatgctttcttcctgttaaagcgtcacactttgccagttgacaaaggaagaatatttataaggcccacattcgtttcacagaacaagcaaacagggtgtacttggaatggagaggtaatcagtgtataactggtacacctcatggctactcagcttccatacgtcccttttgtgtgaactcctgtgtgtcataacaactgtctctacctagcaagatgcagctaacttggttacaagtgaagaagttatcaccattccccaaaatgaggagacacacagtgccaagagtcaccatactccttgctggctatcttaattactcctcaaattcatcacactcctgtggaatagtctgttatctacacactaaattgtacttcagtaagttaactatgttaatttcccacaacttgtgtagaagatcaaaatgggaaggagagagaagaaaatgactaacacatttaaataagatgcaaagataacaggcaaatagaaaatatgcaaagttgctgcagccttcattttttaaattggtcaccagaccatcattgacatccgtggcttcattttttccactatctattttatgtgtcccctgctctcagccccatcacctgctgttcaggcttcttcacctggtagagggacccaaaccttccttcctcaggggttcaaatcttcagttctcctgcctggttttggttgctgtaattctctattaacctttactagaagccatggaaataataagagatgcaccagaggatcacccgggttccagacctggcctctttgcctagattgggtagaagcaacccggttgccctgtgctaatcataagcaatcacaacagacagtagattaacccaccctttcctgcctgttggtttggtgacataatgggaccaaagtgtccaggtgctcatcccgtgtttaaattcggtggaaccactgctttatagcctggtggaagaatccccatttcctcccttggggaccaagatctccaaaccagtgggcttaaagttgctgagacaggaatgaaatattctgtgcattgtttattagcgagaggagccaccctcactttcaccctttgaattctggacccacatattgtagctgtgagagaggctgcaccatatatgggtttctggtccaaagcatatgctgcattctatgaaacagaattctactcttcaggttattttgttccaactggcgctgtaacttgggtcttttggaagcctttctacttttcagttagggcagccacttctgggtgacaaggaaatgtcaaactcctccttggcagttcttttttgacactgtatcgatagcaggtttgctgcagtttctgtatttttgttacagctggcctgtcagttctcatacttacctgctttccagtatgacttgatgtgtgacatcaggtaaatcctttcctctctgtggacctttgagtctccacggaagagtgggaggtttagacttgatgatccttgggaaactttccccttctaaagcattcttgctccagtgaccctgcagggtgagggtgagctcagttgggatggtgcaggtgaagtgaattgtgaatgctaagggctgtgcacgtagcagggttgaggtatgatgtgttcttctcactatcagtggttgtgatcagcgttcgactttgaacctacctggagctgaagaaagggtaccggccccccggttcatatcatcatgtctctgtttcaggacccctagaggcagtgctcattctgtggaggtgggggaagggacaacattgtggagagaaggctagaaaaggaatgaggaagaggttgacattcccagtctgtgtcttcctgtcccctctttctctgctctccctcacagaggctcacacgcacattctgtctctctgccatccaaacagatgcagctgctctggagtcaaccagacttaacgaggagacaactcttctgctttcttccgtcttcttcctacccaccccctgacctaatgctgtgcttgcctgttacagcaggcctaggaggaaatgcactatgccttccctgtttttgttttgtgtgtgttttgagatgcagacctaaaaatattctgctgtataatcggttatccaatcagccatgcgaataatcactgtgccagagcctataggaaatgaggcaggagcctgaaactcagaagcatgccagctttgccttgcctttttttctttttttttttaaatgtgctcccttgggatctgggtttgagggttgagataggaggatatgctgggtgggtttccatggaggcaggtgcaggacactgatggtatgtctccctggtgggttgaggggaaagaatggttggtgtcacagtaggagttttgcacgtagttgaggcagtttgacttatgcctcttgaacctctattccctcctctgggccttgcttccagatgctgcctccctcccccagcacacctgcctggaatgttctctctcctcctctctgcttttccaagtcctgccgatcccctgaggtctagccctctatgttgtcagcaggaccaaccattcatagcggctgttgtctcacgatactcactgttgatagcagaagcatccagctcccatacctctgtgtagggcttgtgtttccagagtcactgtgtgctctcctctccactgtctcccccaattctctccaaagccctccgatgtcagtgggtggggtggaggtagtgaggggaggcaggaggaggtaggtagtttagtgtttaggctaagagcacaggtcttggagtgacagatttgctacttccatgtaacctctgttaaattctttaccttctaagcctcagtttcctcatctgtgaagcactgaaagtagtattttcagtttcataaaccctagggtttaggggtgttatgacaattaagtgacgcattgcctgtaaagtacttagcataatgactggctcctaggcaatgctcaacaaacatgaggtatgacattgtaattatcaccatcccactttacagctgaggaaaaggaagtgtggggagcatgggcgacttagttcacttgtacagtaattgactacccagcaaggactatgggtggtcaactaacaggattattcagggctggctctaagcccaaccaagtgctagatgctgtactggaacagtgactcaggcactcagctagggacgcagctggggaggtagatatttacatgtgagcctcaaatgtactgggggagatggaatggaggcatgtgtgcagtggaaagagccctggacttggagaccaaacagaagccctgtaaggagagtcacttgtctatcatttccacccttttgtccccagcacccaggccaagcccaggtatgttttaggtgctccatcagtctctgctgaaggaatgaagaggagccccgagccacagctctggctgggcctctgacctggggaaccttgaacagctctttgcatccaccaagtcacagggacctcctcagtacagggaggggttggacctgtagggacccgccagctcttgtggtcccacttggtagactcgacagctcctagcagctgcacagtacccagtgtgtgtctttacctcagttgtgcttttggagaagcagttggagaggtgagggcatgaagggctgggctgacgggcaccaaggtcgcccaggtgctggcagtgctgcagacagcatgtagctgtcctcagatggcccaggtctggctgggctctgcaggaacacttcagctcatgggcagcctggatttgtgctgatgcggagacttccctggcagccacagttgctgctgttgctgctgcctggtcagagttgagggctctgacaacagccaccacagctcgcggtctgtccactgctcagaaacctcacacaagaaaacttctgagactgcctctgaggccctttagatcctgagagccccacactcacactgcagcctccccaaatacagccagaacccacccgcttctggttttccatgtggaccatttattgcacctgcccctcctctaggcatagcactgcactttgggctccacccggtcctgctcagatgttgtgctccttaaggaatctctgctcgttggtcagactgactgttttcctccaagagtgcactagagtgtacttgcttctgtctggcgctttatcatctgtaaggcagggcactacagtagttgacgggctggctttgctgttgcacagactgagattgaaattctggccctgctgctccctagctgtgtgacctcgggcaagtcacttcacctctttgacctcaatatcattattggtgaaatggggttaataactcttaggtcctagggttttgtgggatgatgcacttgtacccctttgcaggcagcccttacccggcagcccccactgccaacgtctctgttgtgttcaagtctgtttcatgagccagtgtaacctccctccatgcagaaacaacgctgtaaagtattagcataacagtaggtccattgggcagaaaccacaccaataaaacgggcacaccccacagtggctctgatttccacacccttcccaaccccgcactcccaagccttgcccagggctttccatggactgagcctcagtagaaagaggttgaattagattttgaattttctcatgcctcctgtctcctggccctcagaaaattaaaatccagcattggaattagtcatggaaaaatccccattttctttcctttcattcctctgtgaagatcataggttcaggttatttctttgaattaattggctaagcctcagtgaaacatgggtaatttacctggcactgtgaggtgctggaaattataaccagtgctcctaaatggatatgcagcaaccaagcaccttcatggtgctgatgggtttgtcctcacagtgctgggagatggctaagcgggtgctgtggctattaccatccttactttagaggactgggactcaagccctcatcttgtggctctaaggtgaatgtcctttccctaacatgtctgaccttctccttcctcggcattgggaccctgggtaggagggccagtagaagatccctcagcagaacttaactggccaccagtccagagtggaaggctgctgcttgtttaaaattttaatccctttctttaagtgtgaagaatactgggcaagtgtaaaagaagggaagacatggtctcttccaaccagaaatgtataaactcgctgcagtgcctaggacacatgcgtctttattgaacaaatagttattgaatgtccgcttggtgcctggccctgtgctaagcattggtaatatggtggcaaaatagaaaagatacctcttaggcttctggccatgggcacagacagttaacaaggataatcaagttacagattgttacaagtgctatgaagaaaatttatgaaaaattaaatagcaatgtaagtaggacacactaaaataatacactaagtatcatgtatcagctctggctgcctccctctctttaaagcagagaagtccaggctctcaggggtgcgacagagccaggacaggtgtctagtgagcggcctttccatgggcagtgtgtatggaggggcctggaggtgtgggagtggccattttagaagggtgttgagattaatttctaccgttagaacccagttctcgtccatctctcttttcttcttctttgtttttgagacagggtcttactctgtccaggctggagtgcagtggtgtgatcatagcttattgcagccttgaattcctgggctcaagtaatcctcctgcctcagcctgcccagtagctaggactacaggcacaccaacacacctggctatatattttttctgtttttgtagagatggggtctcacagtgttgcccagactggtctcaaactcttgcgctcaaaggatttcccctcttggcttcccaaagtgctgggattacaggcgtgagccatgattccccacctggtccctctgttaaagcagaactcacagaagaaagcccaaaggaacaaaatttgtactttcatgatgtgggaacatctcttccagttgagaactctctaaagcatttgcaatcatagatttgtgtaagaacttgatttgcaccctaaattttgggatgtatttattacataagcagatatacctggatttgcataacagaaaggactattttggggtgacttatgacagatctgctatgtgaaagcctccaggaacttttagcatcagttgagacctgggggaaacagagaggaaggagcgtgcaggcactgaggccagaggaagaagggatgtgcctgtcctcagtggctagccatgacactgccagaggagcactgagaagggagcaagaagagcacttcctaagtggcgagaatacccagctgcaaacaaaacctcagacacagcctgaagctctgtgtccttttgtgcagccccttccttaccccattgagtagcagcttggagaagagctttttattacagatgacacctatgaatgcaagtgagggaaaagaaccgactaagccagagctgtgaattcccagaaatcaatatggacgggactggggatgcagctccctcagcttctctctccatggcccctatttgaggctgaatctaggaggccctgtgtttttgatacagtgtctcactctttttctgaggcacttttcaaaatttctgtcccagtgctaagcctgggcgagctccacagagctaacctgtgtgtccagagccagccctggctgtttttccagcttttccttatgccaatagtaagattagggctggggacagtggtggcgagagagtcaagtgtgtgtttctcaaaagttgccttgggagaggagtgaggtgaaaggaatcaaggcaataagtgtaacataggcttaaacatacttgcatgaagaaaacaaaggacttaggtataaacaaatgtttctaagacagggcacaaaaagcaatcatcataaaagtctgatacagtaacttcatcaaaatcaaaacttgtgttcatcaaaagatgctgttaagaaaaagtaagtaagccactaattgggagaaaatatttgcaaaacatctatctgatgaaacatttgtacgcaggacaaataaagcatccatgcaacacaataataaacaagcgagcgatttttttaaatgggcagaaaatttaacagatatttttaatagaagatataatggccaagaggctcataaaaagatgttcaacattattgttttcagaaaaatgcaagttaaaaccataggacatgctactacacacctaccaaagtgactaaaatgaaaaagctaataaaactaatgttggtgaggatgtagaacaactggagactcttaacgcatcatcggaggggctgtacaatggtccagacactttgggtaaactttttttttttttctttttttgagacagagtctcactctgtcacccaggctggagtgcagtgacacgataatctcagctcacggcaacctctatctcctgggttcaggtgaatctcctgcctcagcctcagcagtagctgggatcacaggcgtaagccaccatgcctaactaatttatgtatttttaatagagacagggtttcaccatgttggccaggctgatcttgaactcctgacctcaaatgatatgcccgttaggcagtttcttataaggcctgtgacccagcaattttattcgtaggtatttgcccaagggaaataaaaacatgtccacaaaaatatttatacacaaattattatagcaactttattcataataagaaaaataatgcggccattaaaaagaacaagatcatgccctttgcagggacatggatggagctagaggccattatccttagcaaactaacccaggaacagaaaaccaaatactgcatgttctcacttataagtgggagctaaatgatgagaacacatggacacagagggcaacaacacacactgggtccttttggaggttggagggtagggggcgggagaggatcaggaaaaacaactaatgtgtactaggcttgatacctgggtgatgaaataatctgtacaagtttacctgtaacaaatctgcactcgtacccctgaacttaaaaaaaggtagaaacagcatagatgtccgtcgggagaatggataaacaaattatgatatattcatacaatggaatgctactcagcaagaaaaaggcatgaactgtgatagagggaggtaacataattatgttcaatgaaagaagcctttttttttttttgagacggagtcttgctctgtcacccaggctgcagtgcaatggctcgatctccgctcactgcaagctctctgcctcccgggttcaagccattctcctgcctcagcctcctgcatagctggcactacaggcgctcgccaacacgtttggctaattttttgtatttttactagggacggggtttcaccgtgttaaccaggatggtctggatctgacctcgtgatcagccggtcttggccttccgaagtgctgggattacaggcgtgagccaccgcgcccggccgaaagaagccttaaaagagaaagcgcggtgtatcaaaactcactaaatgccacatctaagatttatgcatttctcaatgtgtatattttactttaaaatactcataaccaaatattaaactctagatggtgatatacatgtgtcagggtttaggggttgagtgtacagaggtctgcaccttcttttgaaatgtatctaaaaataagatagattgatggatgggttgagggatgacaaggtgtgtgataaagctaggaaaatcctagttgcacaatttaggtagtggaattgtgggtattcactgtacaattcttgtagcttctctgtgtatttgaagatgtttgtaatacaggttggaataaatatgctcaagtggaggatgcaagttgcagtagcatgaagggaagataattatgatttatcaccctttgttacacagtgctattttgtttatcttctttaaaattccattaaaacccaccacaggagcctttgcaatgtagctgatttatcaaattcagaagaatacttccagcgtctctgactcatttgatcacctggatacctttgagttaatcttccagccacagctctgattctccccttttgactgtgatcatcctgaaggtgtttccctcaatgctgagtgcttggagccgctttagaattgctttcactctctgttaatttggagaacaaagaatcaataagtagaaggagattgggaaattagtgatcggggacggtgcagagttcataaataatttaaaatatacagagttctggcttttcaacagagattttaataaaagatgaacaaggtcatcttcttccttctgatgaaagttacccatctgtagtgccatggcggatgctgtgtacaagagctgaaatggtggttcctgttaactttgagagctttggacaaaaatgccagatacatccttctagatagcaatatcaggcgagcctttgagtggggaggggaagttataaaccactgtagagaatcacagagtgaaccgaggacagagattggatcaacactccattccttttctgttttcttggaatgaagtcagagcaacattgttttcatttttgtttgcagtgaacctaatttttgaactgatctatgtagtaataagcacaggaaaggaaaagtggaagaaaggagattcagcacattagctagtgaggtcttgcgtgataacgaagacaacacaagcctgagccctcctggctagtgaggttggctctgcctgcctttgcccatcccaccaccttctcccgtgctgagcctttcccagccagacagtgttttgaggggcctttactacccctctccctgccagccccagcctagctgtaatcacccatctggaaggcgtgttttcctggcatttacctcccattatatggcacttcacttgggaagtgctccaacagaggcactctgctgtatcccaagaagccctcaatggcattaccgtaattctgtttatatgacgcacccccaaattcttgagctgtggctgtgacagaatcagtaattggaaatagaatttctgtgatagtcactgagttcccccaagtattaggcctgggagtggacttgtccaggtggtatccgtgggattgtgtaggggcaaacagcgatggataccctgttgatatactgagagatgctaagaaatccaaagcattccagtgacagcgaacattgcattgatagaatagggatgtaagaaggctgattaattgccacatttgataaagggttggagaggggatgaagggggaagaacgtgtgtgtgtgcatgcacgctaaggagtaccacgatagtttgtgtgtttcttccattgttttcagccctggataaagagggcccacctgtctccaaatccctggtagcaggcagagctcagtacagtaggctatattgggtatagggcatctatgaggcaaagaccatatctcactcacatccgggtcttgaggtcctgacattgagagtgtgccctggaaagagcaccgaaggttagtgagggcagctgcgtctgagcactggtgctgatgctggtgggatggactacagagtctgtccccactacctttggaagagctacccaattaaaactgagttggtggaggtattcccactgtgtctcccacaccttctctcgagggttcagatatgtcgcgttctgacttcccagcagcctgcatcatgcctcttgtctccagcacttccctcactgtgttcttgctctactgagtactctcagctgtgtggttgctttaggacccaagcggtgctgttccctcccctaggaagatgtgctcttctgggatttgggagcattcatgacatcgttctctgtaccaccctacaagcatccctttccctaccaggtttgtaatatagtcaacttttagggagggggacatgtgttcatttattgttttattaattattaagtgcccttgctgtgttgggaatagacaaggaatttgccgaaactataatccataaccacccagatttctattagaccttcatgttcatttacagataggacttaattttcttaatcagttaccaattgttgggtgactggttccctgttaatgtatggttgggtgagtgggccagctgggtatacagaggttcagggtattcaatgcagaaaggacctgaagatccatggaggtcatgtggtccaactttctgccttcagaggaggagtgtgtgtggggtgcacatctgagaaaatttacagactaggctggggtggggataaaggagagtcttatctgtaggtctgctgctttgggtttctttagattagcttagaagctggaaactggccaacgaaatgcacagaattgctggaattctggagaagagtttgcaccttactctgtactttctaattaaaagggggacccctcagaggtgattccgattctggactcccactggtgtagtgtggcaggttgagtttgccgccccgggcacatcccctcatggtcagagggatgaagaggagggggtgaatgtcaggttccagaaaagcctgctctaaagtcatttcctggtcatgctgatctggaaatagctgagaactgtgattgagacccaagttttgcccccaaagctagctttatatatggttgtagcagtcaggacctaccagatggaggggacctgtgggatagggataacaggtgccgtgtgcattggcacacaggagggcaagaggggagagagggaaaggctgcgaggggaaatggagagagaaaggaggctcttaggaaaatccctggaggagggaagacttctaacctgagccgaggccctgagccagttcctctgattttttttttaaagtcaaacatggataaagtcacactcaggtgtcactgtgaggggaaaggtggagaaaagtgactgtggtttcagtttcagctttagccaccatcttggcttatgatgttagatcagttcttgcctctctctgagcctcaatttacctatctatattttattagttgaggaatcctgaattgtaacatgaaatggttgtatgtttccaatctctgcttttacctgtgccttgttggatctccctctccccttcctagatgacctcttgggcagacttcccattttcagttaacgaaacgtcagtgttttcatctgatttaagactccttcttgctcctgccttgccactgtagtaagggggcgtgggctgctctccctacctctcagctctgactcctccattagtgagaaggaggcagagggataggagcaagtacctttatgcttaactgggcacaagagatgttttcttcctggttggtttttgcagcttctctagctgaaactggccaggcagcagcacccttggtctgacaggcatctacgtgcagattcctgctgaaattctgtggagacctctccacctcacaggtcccaatagggatttgtggctctggttcagccactctgatccctgctgcacagcctctggttgctagagtaaccttgcatggtggccagttcccctgggtgagatcccagagagagctcaagcctagccaccctgtggggcccacttaacttgcaggaagctcatgggtctctgccaggtcaaaaggtagcatggcgactgtcctagcacaggcgagcggagcagcggttcaggactgtagccaaagctgagagttccctggggtctgaggtgctagtttatccatcttgcaaacgtgattgtcttgatgattctcttaagtccccgtttcttagatctaggaaggggacctccctctagctgttatcctcttccacaaggctgccaacatgctgatgctgtgttccctctcaagcctcactagcctgtggctgtggatgggtggggggtgggggatggtggaaaagggatggttgattataaagggctggcttagtgagccctgggctggggagatgtctagttccatctgttggtttcttagaaaatgaggtattcaggccgggtgtggtgactcatgtctgtaatcccagcactttgggaggccgaggtgggcagatcacctgaggtcaggagttcgagaccagcctggccaacatggtgaaaccccatctctactaaaaatacaaaaattagcccagtgtggtggtaggcatctgtaatcccagctactcaggaggcagaggctgaggtaggagaatcgcttgaacctgggaggcggaggttgtggtggccctgagatcacaccattgcattccagcctgggtgacagagcgagactccatctcaaaaaaaataaataaataaaataaaataaaatgaggtattcagttcttgttttcagcagggagccctgtcttctctaatacctgggtaacaggaagcagtcacccaactctcctttatgtacagaatgaagaattttatcataacccacactactataccttagatacacacataagcacaagtgtcagatgcagaccctgtgccttttatttgtgttgtctttctgtgcttttgctgttctctctgtggttatttgtcaaagtatgagggtaacttcttgtggaaggacagatgttaagtattctttaaggccattgtaagctccccatcttccaaaccttagagagtcaacacacactgttctgagtctgctgtgtgcttacatcagtgctgacagaccaaattatagtactccctaacccaattctaaaggatgaatgccatggcacttaaagtattttgcagaaactattattttaacttattttcacagtggctatgggttttttatagtcttgtaggaactttggttaaatacagagtaaaaactgaagctgctatgggaataatgagggatcaggtccttcaaggtcttaaaaaaaatctctaagtagcagtttcttttgtgcctgcaattctgaattgcagtgtgtccctccagacaaagctgagcgccatatgtgactgtgcctgtttgtgttttcgaaagcctcagcggtcactgccatttcagtgcctgcaagtcttgacaggaagcagtggtaaaagactgtcagaacctgtttgtaaaaatgtttgtgtttgcaaagatttttgctagtattccatgcatatcttagctattaagcaaaaatattataccattcatcttagaagaaggaacaaggctaggtaatcactagcattctcttttctttttctggcagagaactgaaagccaagagcattctatctcatgagcactacaggtctagggcaggggtgagcaaaccttttctgtaaagaattgaatagtaaatattctaggctttgtgggccgtgtggtttctgtcacggctactcaggtctgctgccacagagcaaaagcagccttagacaagaaaacaaacgagcgtggttgtgtggcagtaaagctttatttacgaaaacctggctggtggaccagaggccataatttgccaacccctggtttagtgaaaagaacaagtttcgagttgtcaccgatggttgaatttagcccaagatggtagctttgcttgtctgattaccttcatgccaacccacattttctctggctgacactaaccaggacagaagcctaggctggtcttccattttctcttaagaaagtgatcagtttatgggattgtatgcactttacctcacccacagcagatgttcaggaactgagtatccaacataggataaaatacagaatgaaagcatcctttaacattgagatgaggttgtggtgaaggggaggagttagcagtctgtcactggggtgactttctggggagctctaatcagtcatgtgtttctgctagcagcagcatcccctcctcattcctcatgtggcatacattgcaggtcttcctggcgcagatgctttctttgctcacacacattccctcccttctttcgtttttctccccccagcacacaatgctgctgctgccacacaccatttcaccccatgctggcccacaaagaagacagaggttgatgacatagcatgcaacttcagaaagttcaccactttgagccccgatgtataaatggtagcagttggtactaactctgccagtgcgttcaaaagtcatcataaggacaatgtgatatttatttaaatacatattgcattgctgactgacagtgtatttgcagtcattatccatttctagagacaagttcatggcaagcatggtaaaaagctggacctcaggagggaactgaggacaaagtaagccctgatgactctcactggcctcctgctgcacctgtccttatatttgacctgttaggttggttactttaaaaagccagttacggggaggctcatttaaaaagacataacacctgtgaaagattattttaacgtggaatatatgactggacaattatttgccaatctgatgaagtagggccacaggttttgttttcattattctgtatctactgatcagcatatccacttgcttgcacaggctacacctataatgtccacaacttccagttgcctcttatgtaacaatagaacaagaacataaagatacagaggaaagctgagagcaattctaaatgtctatggttttttctttatctcttgttgttatacatccatatctgattcaacaataaaacatgtaacattgcttatccagtacttccaatggattcagcctggtgttttggaagaaacaactctttcttttgcactcgtatctcattatttgagacagtacttaattaatttaggtagttactaatccaactgacataaacttgggaaccaaccaccaactcctgataagcaaacagctcaactcttggggaacaaaaacgtgtaagctctttagaaattaacaagtcatgagagttcagtatggcttgggcgttagtcattaccttttagccagagggaacaaagaatgccagttcaaatgacaagttggttaaaaggaaatctgacagcttctagagtgttggaaaagaggtcaagacctgagcttctaccctcaatggctcaaacaggcataccttggagatatggttggtttggttccagactaccacaataaagcaaatatttgcagtaaagtgagtcacacaaatgtttttgtttcccggtgcatatgaaagttatgtctatactatactgtagtctgttaagtgtccaatagcattatgtctaaaaaatgcacataccttaattaaaaatactttattactaaaaatgctaatgatcatctgagccttcagcaggtcataatctttttggtggtgaggggctttgccttgatgttgatggctgctgaccgatcacagtagtggttgccgaagaaggctggggtggccgtggcaatttcttaaaacaaggaagtttgccacatgatagattcttcctttcatgaaagatttctctgtagcatgggatgctgtttgaccgcattttacccacagtagaacttctctcaaaattggagtcaatcctctcaaaccctgccactgctttatcaactatgtttatgtgatattctaaaccctctgtttcatttcaacagtgttcaccaggagtagattccatatcaggaaaccactttctttgctcatccataagaagcaacccctcatttattcaagttttatcttgagattgcagcaattcagttctaccttcaatcttcacttctaatacttattctttgctatttccaccatgtctacagttgcttcctctactgaggtcttgaacccctcaaagtcatccatgagggttggaatcaacttcttccaaactcctgttaatgttgaaatgttgactttctttaatgaatcacaaatgttcttaatgacatccagaatggtgaattcctcccagaggttttcaatttactttgcccagatctgtaagaggaattgctatctatgggagctggagacttatgaaatatatttattaaatcataaggcttttcagagtcaaaattactctttgattcatgggctgcagaatggatattagcaggcatgaaaaccttcatctccttgtgcatctccatcagatcaggtgcattgttagtgagcagtaatattttgaaaggagcttttttctgagcagtaggtctcaacagtgggcttgaaatattcagtcagctgtgctataaacagatgtgctgtcactcaggctttgttttccatttatagagcatagagtagattgagcatcattcttaagggccctgggattttcagaatgataaaggagcattggcttcaacttagtcaccagctgcattagcccctaacaagagagtcagcctgtcctttgaagctttgaagccaggcattcccctctctagctagaaaaatcgtcgatgggatctccttacaatagaaggctgttttgtctacatgaaaatctgtttagtgtcaccaccttcatcagtgatcttagatcgtctggagaacttgctgcagcatcctcatcagcacttactgcttcaccttgtacttttatgttatggagatggctgcttttcttaaaacttatgaactaagccctgctagcttccaactttctctgcagcttcttcagcctttatagaatttaagagagttagggccttgctctggattagactttggcacaagagaatgggctggtttgatcttctgtccagacccttaaaacattttctgtatcagcaataagggtgtttcactttcttatcatcatttgttcattggagtaacacttctaatttccttcaagaacttttgctttgcattcacaacttggctaatggtttggtacgaaaggcctggctttcagcctgtctctgctttgaacatgcctccctcactaagcttaatcatttctagcttgtgatttaaagtgagacatatgagtcttcctttcacttgaatactgagaggctgttgtagggttattaattggtctaatttcaatgttattgcgtctcagggaatatggaagcccaaggacagagagagagagatggagaacagctggttggtggagcagtcagaacacacacatttatcaattttgttcacagtcttctatgggcgcagtttgtgatgtctccaaacaattacaatagtaacatcgaggataagtgatcatagatcaccgtaccagatacgataaaaatgaaacagtttgaaatatcacaagaattaccaaaatgtgacacagagacacaaagtgagcacttaactgctggaaaaatggtaccaatagacccgcttgttgcagcattgccacggatgttcagtttacaaaaaattgcattgtctgtgaagctcaataaagtgtgaagtacaataaaatgagatattcctgtataataataactattgtgtgcatactatgtgctgaccattgcacattatctcatgtactccttttaaccgtgctttcactgattagaaaaccaaggcaagggctgggtgtggtggctcacgcctgtgatcccaacactttgggaggctaaggtgggcagattgctttgagctcaggagttcaagaccagcctaggcaatgtggcgtaaccacatttcttaaaaaaatattagcctgtgtggtggcatgtacttacggtcccggctgctcgggaggcggaggttgtaatgagctgagattgcaccattacactccaccctggggaacagagactctgtcttaaaaaacaaaaacaaaaacaaaaaggctgagttagagaagagcaaagtgcttgcccaaggttatatagcttagaccgagtggggattttgaactcagactgcttgactccatatttactgtgctctccagcttagggcaaactggtagccgggaagtcatccagctcgatttcagcttgcctcctcctgatttcctggatgtctggtttttaaaaagttaatagcaaactagtatagtgttggctccacagacgtgcttttcagaacccacctatttgccctttactggtaatcaggggtaatcctgtcccatatctgtaccctgatatgtctgggttgtaaaaagtgtaagactggatggtacagttaagctatttgttctggatttgggttttttaagtttggcatttgagcagaatcacaagttgtagaaagtagtaatttccagacatttgagatctgattcaccaacattactgtaattaaagaaaaacctatatttgtttgctccgttttgtctcactaggatgttttataaataataaacctagacatttagaaaatagcatctattcagctggttaagctttcgtggcccttcatgttcagatgtctcaaggtgatatgagtgtgcctcaatttatagggagtgactatggatggtgaactatattgacatataaaggcagctttaaaatacagactacagaaatcaagtggcttgacaattcccttagaacatatgtttatgaagtatagagctcaaatgtaatgatttcagttggttacagagtattaatgaattttgaattgaggcaattgtgatcaagcttgttgccttttctaacatgaatcattattaaaatgatgattgtcctccatagttatgaaagcattaaaaaagcatctacctatgcctgaattaacgggacagatgtggttttcagctttcacctggccaacaggacttccatggttgtgatttcaaggtgcttgtttatgtatatggttttgctggtattttctgagtcttcaataccatttcttgtaatagggtgtgaatgggtgtgtgtgtgcttgctagtatgtccccttggtccttagcattgtgggaatgtaaagtgaagctgagtaggatgtctcaatgtcctagaatcctccagcctttggtttttaagaggtacccctgtgcgagagctcgtggaggcccttctgtgtaacattcacaacacaaccaccacattcagtgacagcaggtgctgagtgcaaaccgtgtgccaggcatttcccaccatcagtatcaatcctcaattccagaaagttggtactgttgtgaccattgagaggatgaggagaccgttgcttggagactttcagtgccttgcctagggccacacgatggaaaagagcagaaccaggaattggactgctcttcaccatcctcatggctgcctggagggcaggcagtcttgggcttccttaaaagatttttgttttgggagggctcttcactgtctcaagaaagctgagggaagaattcgtctcatttagtggatgaggatacaaaaacatatgttaaaaattacagcctcgggctctgtggaccctgttcaggtgccagagggcttttctcctatattgagcacctttgccacaaagaagctagaggaggaaccctcccccgatttcaccttgtgagttacaggtgtctgacagccctgttcttagctaagaagtgtgtgtgcacctgactgcaaacagccgccatgcctgctggaggacacatgtgacacacagtttctggggaccctcctgggcctacagactgcagtctcgggtgggtacccatggcccaggacttcacattcctcacactgccctgccctgcttctcttctgtctgacctgatgccccaggcttagggtggggaggggatgctggtgggtgggttgtcattttcctgtcccagtcaggtattttgtattgtttctcaatgagccatttcccatctggatttgggggggatcagggaagatgggtgggttatgagttagtttgctgggcatcttcccttttttctctgtccagctcccaggtgtttgaggctttttcctgcctccaggtgctccaaatgtgggggctgccctttctctatctgggtttcagcctctccagctcctgcaagacagtgctgttggatctctgtagtgcctcttggtttggccactctgggatttgtgagtcatagtcttcagtttggtgctttttcctactccatcctgccttctgctattcatgccccattgcaagaacaggcattcttccttcccgtataaacttgcaacctggttccacccattctcctctcttcttctccagatagtcgtagagatcgctgcctcccaaaatagccccatttgattccttaggacaggcaggaaactcgctgcccgaccctgcctgagtctccgtttccttagctggagagactgtccttgctctagaaaccaaccaccggaaattcacctccatccctatcacttcctggggtagttctttctgaccattgggtttgcttcttgggtgtctggctctgcatacagttagaagctctttaaataccttttaacttcagggtttttgtggatgtgtatatggtggagggagagagtgtataccagtgagcatgagagcaagagttactatttatcacaactggtgtccaggggtggctaaagattatcgacttctagagttgtgtttttcaactttttttttaaatcttagtgagcagtaataaatacattgtaactctcaagcacacataaatgtcatctgaaacacgtttgaaaaatatatgcgatttatttgttttttgagatggagtcttgtgctgtcacccagggtgcagtgcagtggtgcaatctcggctcactgcaaccacggcctcctgggttcaaacaattctcctgcctcagcctcctgagtagttgggactacaggtgtgcgccaccacgcccggctaatttttttgtatttttagtagagaaggggtttcaccctgttggccaagctggtctcaaactcctgacctcaagcagtccggcctgccttggcccccacgaagtgctgggattacaggcattagccactgcgcctggccgaaaactatatactcttatattctgatatttcctgtgcaatgtgatattttccatacaattttatttcatttttcaaaaattgctggatacaaagcactgaattaatttcatatgtattttatttaaacaatcctctctcctccattacagtatacatttcatggagacaggaattccatgttattctacttcctataattgatgcttaatacctattgtcaactgattcttttctctgtgcagatcctctggagaaatattttgttctgtgccaagaaacagtttcattcaacggttaaggtgacttgtgtcactgatctgatttccttcttttacattaactatcaaaaatctcagacttattaataaagacatgtcttcacaggatacatctttacaatggtcttatttttattttattttcctcgctctttttttttcattttaccttattcttctgtcctaaatatttaaagtttcagctgattttaaagtaaaagatgctcaatgggaaaagctcacacaaatcagagctacctaaaagtagagttggaaagtcccaaggatctttttctctgaggcaagcctctttgcttctgggtgcttgccctgcagactggcttatgaagaggtcaccatcttttcagattccaggggcctgtaatgttcataccactgcagtattcgtattacacactgtaataatctggaataataagatcgtaggcactctttcttgccctcacatgtggatctgccttctccttttaaacagccatgtaacgttccctttctcacctactttgaatttttatattcttgctgctctaaggttttttttttggagcaaggaaagcaatttaaaacataaaatttactttcaaaagaagagtagagataattaaccagcccttgccacctaactcaatataatcccctagtaactcctcttggagccaccaggttccctgggagtggaattgcctgtggaaaggcctgtgtgggttctgagcttgggaaatggtgacggagccctctctctagcctctgggaggtgtcaaataatggatgagagtgaccttggactggcaagagcaggtcagtgcaagtgacatgggtttcttagatactcctcagctcagtgtgggtctcccgagactcagttctgcctgctgacttgctcattcatttccattgcagggctgcagttgggtcatgcctggttttttggcctcccaatgtctcttaattaacttaatattacttggtaatactaaagcaatgatgaattatgtgcatggagtcattaatcttctgtgtaaatatctcaaacgctgtgtcttaattatagactccatacttaaaatattttaaagcttctattcatatatttacttagaaaggtatgatccgtgtttctatggtgtcggcacactcagtgggaaaatggtgtccatacattggagacgttcgtatgaaagagtagtttctctgatgagatgagtgctgcctgttctccactgacccacagacattcttagccttagcaatgaagggagttggggtaagattgggcctggggatctgggccctctttcaccttctgactgttctgtctatagcaaaccatagagagtttttctggacagtccaggaaggtgtaagagcagctttagatgaggcagctgtctccctcatagcagagccagccctaagccagggcagggcctcctccgggaagaattgtgcacctccttcagggtcatcagtgagttaggtacattgtgagtatactaacttagtatttagcagttactctgcaccgggcaccatgctgttcctgggtggtggctggtggctggggcagggcagtgagtgttacatagactagacacagcagtaatagccaatgttccatgagaacttgccatggggtttgccacacgaagacactggctcttgtttacataggctgcctcatttgcacttaccaacaaacctgggtagcttctggtgtctgtattctcattttacagtgaagaagctgcagtgaggaggggtaaagtcacttgcccaagtctgcatagctaataagtggcagagccagaacctgagcccactgtccaaggtgaaggtgcttcctagcatggtggccacctctaggtaggagctcagctgtgccacccactgggacagatacactcccaacagctgtgattgggtagggtggctccacctcccagatgggtcctcggtttgctgagtgttggttggataacttgactaactttctcagcagtcctttgagcagctgaggtcatacttagatgtgacttacgtgagacaacagaggagtccaggtgagagctggcaggcatgggaccagggtggagttgtagttttccccaccaggtgggtggagccaggtctcttcaaaccagagggcacaattgctgtttgtattgttcacgttgactgtagcaaaaataactcagtgcctgtgaacctcatctgtgaaatgtaaataaccccttctctgcctatttgttttttgagacggagtcttgctctgttgtgtaggccagagttcaagaccagcctgaccaacatggtgaaaccctgtctctactaaaaatacaaaaattctccacctatcttactctgtagcttgggaaatcaccgagataagaggttggaaagtgataactgtccaggcatgcaagtagtatgtttataggaacatgactgagcaacagggaaatgagatttctctctctctctctttttttttttttggagatggagtctcgctctgtcaaccaggctagagtgcagtggcacaatctcggctcactgcaacttccgcctcctgggttcaagtgattctcctgtgtcagcctcctgagtagatgggactacaggtgcatgccaccatgcccagctaattttttgtatttttagtagagatggggtttcaccatgttagctaggatggcctccatctcctgacctcatgatccacccacctcagcctcccaaagtgctgggattacaggtgtgagccaccgcgcccggctgagatttcatttttaactcagacgtcaatcaacgtagccatatacagatttgaaaagcttttctttatctctgttaatggagaaaaagaatgactgctttcttgtcaaaatgaaagtgttcagttttaaacttaaccagttcctgccattttgaaatgttcactcatttcttacttttttttttttttttttttttgacacagagtctcgctctcacccaggttggagtgcagcagtgctatctcggctcactgcaacctctgcctcccgggttcaaacaattctcatgcctcagcctcccaagtagctgggattacagactcgtgccaccatactcagctaatttttgtatttttagtagagataggtttcaccgtgtttggccaggctggtcttgaactcatgatctcaggtgatccacctgcttcggcctcccaaagtgctgggtttacagccgtgagccactgtgcccagccaccatttcttactttttggcaaaggaagtagacatattggagggttgacctgaactccatagattcccagggagacagtgtatgactttgatcagcccatgtagggcacattcccattgccatccaattttacctgagccattgggatgggatgcaaaggcctgacatggtttagaaataaagcataactctgcagtgccaactaggatggggtaaatgggattctggcctgggtgacaactaagacaagattgctggcccaggtgctgagaaatgtagcccgagataatggttctgtttctccttttgtgtagagatgggatcttggaatctagtgaggtgaagtacccagctctctgctttggtactgtgaggggattctgcagaggtagatggaatatggtttttgtcctcaaggcactgacaagctgcaaatgatacgagacagtgtatcaataggttcaccttcccaacccttctctgctcttgtacttggttggtgctcaattgtttgttgatatgatttaccttcatgatgacatgtcaaaacatgtgatataatttttagctctggatggcaaacagtttcaacttggatgccaactctacccagtgggtgctgcctgaatggcaaaacatgtgacactgcctcagggtgccaggagaaagagtgccgtctgatgaccagtgggaatgtctgttatggccgggggatgggggttagaagcagcaggcatgtggtggtcattggttcatcctaagtacattaggctttcaaaaggggaaaaatgatgctcagaggaaatgaaactccttagtcttcccttaaagggtgaagcaggatttagacaaacaggagtgctttcagtcttggaaaagagcagacgtgaagaccgtaccttccagtgagtatgcagatatgtgggaggctgtgggagctgagggactggaggcacgtggaggaggaaggggcatcaggaggggcaggggcactgtcctcgctggacccatgacagacgtcagttggttgttggtaggttgagtgtagacagattgcagaggtcctcggggatgccagatggaggaatttagatgtgatgcagtcctgtgcttctcaagaagccttcccagatgctccggacacgattagctgctccatcctctccgccccaaaggagactcctagtactctgcttgagcttggattcttgtctgctgtcctgaaatgtttatatattatctgccatcctccttgaggatatgaacagtgttgtagccatctttgaatccccagtgctcaggatcatgcctggtatggagcagataaccagtgagtggtgttgaattgagctgaaatagggtccctgaactgccaggcgagatgggatggaagtgggcagtgccttagaggtgaagctgggtgcggaagtgggaggctgccaagcatagaatgtaccctctgccaagggagctcagagtccatgtccctgggatgcacgggatgggaaggaaggcaagtctgaagcgtcaagtttacaagagtgtgcacagcacaggaaaccagttgaaattgaagatggcaacagagaacggaaaagattgaaggagggaatttggaaagctgagcctagatgaattcccagaggcagtgacttatagggctcggaggccctgtgtatagggaaccaccgctgaacctgtgggtcagagggagtcatcaaagatgttgtctcttgagaaatgaggagctactgaagattctctctctcagatacctcaacattttagagacatggagtgatcctacagcccattgtattaatatttaggtgggactccttcatttgcaggtgacaaaaactgaacccaaactagcttaatttggtggcttttataactgaaaagcccaaatggggaggggaggggagagaagggaatttttgacttcaggctcaacttgatccagggatgcatacagtggcctcagggccaggtgcctgcttctgagtttcgctggctggctggctgactggcacactttctcttcattttttggcttggcttcccttggtgggtgttagctcttcatctctatgtccccctggcaactctaggcttgtggtctctcagggctgaatccagccaacaaaagaacttcttacctagttaccccagggaaagctcccagacttgctctcttcggacccggttggtgtgggttggagcttatgcctatccccgaaccaataaccttggctgcatgccaactcttattgcccctgggatgagagcaggaatggagcagttcctgggggaaggtcagggtgctgttacccttggagttttgctgggtggcaaggccatcattactgccccatccaggctaactgttgtagtcttggcagcaaagcagaagctgcctttgctctgccggtgaggaggagagctccctgccagcctctgccgccccaggcatgctgctgccctcttcccacagaccgcatgtccttgaagctgggctccgtagagtggtccaccaggtcaccctgctggccacctccatttgtcatccctgggcacattctagacagcatcttgggccggggccttgccccacctgggtgattgtggggtcactgaactgtcgtgggatctcaggagaaacctcttcagagagtctgcatccacagggagaagtgtattcacacttcccacaggctggggagctgtctcacctatccttagtcagggcgagccttccattgtgaggtgctttatagtttgcacagctctatccaacttgttacttaatctggcttttaccataacactggtgggcaaggcaaagcaagaatgattgtccctgttttatggatgaaagaactgggaatcaggaggggtaaatgtctcaaacggggcaacacagctgtcgagactagcattagacttgggggacacaaatgtcacataaaatgtgtacttttaaaccgaaggtgaagaaagatgagggcaaacagactactgtagccagtttcttcatgtaaatgtggtgttaaattacccattgttgttcctctaagtgcatacttcattaatacctgcaggggaaaaaatgacctctatttacagccaagcatctctgagccgacgcctgcctgcccaccagcctcctgtggtttacccaccaaaattttactagaggttgaatcggcttgtagaagctgtgtgatagcgctgcggctcccctgggtcacctcctgaaacgtgtagggtcgtgagtgggagggtgtctcagcaagcccagcctgaatgtgcacgatggcctcaatcgacccagccacttgaaaaagcagccgctgctctcggttcttgctgttcttgcttggtcagctcttccctggggtctctgcgccctcacagagcctccctgtgaagcctgtccttggagactttgctcaccaggtcatagacaattgttgttttccaactggaagagatcatctgatttagtctgttcatttcacacatgagaaacgaagaccaaaccccgtaccgtggcacctggggccctttgtgtctgccctccactgtgtccctgcagcctgtcccttcccttcccacctgtcctcataccttgtgcttcagccatgtggactgctcttcgccctgaacagcttgccttcgtgcgggctcctcttctggatggaacaccctgcctggagcagggagggccatgatgagggagcaggtggctgtgctgagcctttccctgacatgcactcatggatgttttcctggaacagagcaaaaccagggggcgctggtatcatagaacttcttagtgggaagggacatttaataatagttggtcaaaacctctcattttgcccatttatttattcatttataaatgcggaatatctatttttgtgacaggccttgggaatgcaatgatgcatgaaatagaaatgatctctggctttaaaggaatgataatttattaggggagacaaatattaaagaggcaatttttaaaaattgacaaatagctacataattagggtgtacaacatgatgttttgatatatgcatacactgcggaatggctaaattaaactaattaacatatctattacctcacatgcttatttttttgtggtgagaaaatttaaaatgcagtcttagcaattttcaagtatgcaatacattgttgtaactatagccactatgttgtacaatagatctcctgaacttactctttctagcttttgtatactttgaaattttttatatgttgatcaacatctccccaatcttcctgacccccacctctggtaatcatcattcttctctctgcttctgtgcgttcagtgtttttagactcctcatataagtgagatcatgcagtatttgcctttctgtgcctggcttatttagcttagcatagtgtcctctaggttcacccatgttattgcaaatgacaggatttccttctttttaaaggctaaatagtatttcattgtgtatctataccacattttctttacccattcatccattgatgaacatggaggttaattccatgtcttagctattgtgaataatgttatgaagaacatgggcgtggcagacatttctttgacatactgatttcatttcctttgtatatacattcccagaagtgggatcactgcattatatggtagttccactcttaattttttgaggaccctctgtaactgttttccatagtggcagtactaatttacactcctatcaacagtgtacaaagcttccctcttctccatatctttgccaacacttatcacttgtctttttgacaatagccattccaatgaatgtgaggtgatggctcattgtggttttaatttatatttccttgatgattagtgatgttgagcactttttcatgtatcttttggctatttgtatgtcttcttttgagaaatgtccgttcaggtcctttgcccattttaaagtcagattgttttcttgctattgagttgtttgagttccttatctatttttgatattaaccctttatcagatgaatggtttaaaaatattttctcccatttcataggttgtctctttattctggtggttttccctttgttgtgtgtaagcgttttagttagatgccatcccatatgtttattttggcttatgttgcctgtgcttacagactcatatctcaaaaatctttgccctgtctaatgtcaagaagcttttactctgtttttctgtagtactttcactgttttaggtcttaatgtttaagtctttgatccattttgagctgatttttgtatatggggtgagagaagggtctgatttcattcctctgcatgtggatgtccagttttaccgtaccccttattgaagagactgtcctttccccactctgtattcttggcacctctgtcaaagatcagttgaccataaatgcctggatttatttcttggctttctgttaaagaggtaattttttaaaatttaaatttctattgtgaattacggctgtggaaaagtataatgggctttgacagcatgtaacagcaggctctaattttgtctgggaggtcagtaaaggttttgctgagaaagtgtcatttaagctgagccttgaagggcaagcagagtgtagtctgatgagaaagagggttggggagactgttttagaaagaagggaacaggatgtggaatggttccactgtggcccagggccacagcatgaatcagtggctgagttgggactagcagaaatcagatctatggctccaagccctgtgttccttgcattcaaccccgctgggtgcgtttttggccctgtatcacagagctctatgcttattcatctaaagagggaagttcatgtccatggggcaggcacccttggtggataaagcagggacggcaaagacatggaggtgggaaggtggctggcatgtgtgggagggagcaggttggcccatgacttggagtgaagcactctgacagaggagaggtgggaaagttggaagaggaatctaggcaaggatgaaaggatgagatccttaaccaagaagctgcaggttgggatagcaggggaggccaggtgagatattgagatcagctgttgtcctagcagtttgactctttatttcaggcttgttctaaaaagggtttatggtaacttagatacatacatatgtatcctgttttttgtttttgttttttaaatacatatgctaggatcataaaacctcatgctgtaatagcctctacatgtctagatctatagctttattcctttcggtttttttcttctctgctttctagtagcacctatgagtgccttacatatgtctgatgctacagttaaagacacaaagagagggcccctttcaatagagaatccaggactgcagggcacagaaggaatggaaggtgtcagtgggagagggggacttctggcagagtataagccagaaagccttcccaaagccttggggcacatgggtggaagagcaaaacagagaagtgactcttacctggctgcatcaagcctctgttcaccttttgacagcagcttgggagctctgtgaggacagggttctggctttgctgagaaggatgcaggtgctcggggatagatggatagacagatggacaagtattcatgccacagcactaataagaggattcttaaaataggaaaggaaagtaccaagtctaatgaaggattttggcatctcccacctcctgctagttgacagtttctgtttctcaagattctgtacagcattaactggtttggagattattaactagtttagagactactgatttagagcctctcctgttggtgaaatttcactgtttaaagaagacacatcaggttttagaattagatttcagcctttgtttctctagtggcttgagttctcgtgggcggggtagggggagggagtggggggacatccgtccatatacagggtagtttctggacgttgttttctaaaggaaggtttgactggccctgcctactcaggatctcctgccagggagaagaaatccctgctggtgggtgactgagtgccacaggtgtgactctgcctggcacacagagggggatgagatgcaagaatcatttactctttccctgtacctggggaagggctgttaaggtacagctcctgctcaggccttttataccagggacgcctcatttcatgtatggttctagagggttcctgctggccccttcttctgccatcccagtctttcatccttgacagtgcttcttcctctgtgcttccatcagtcgtggccacagacctcagtgtcctctatgtgtcacctctcacctagctgttttggctgggcccacagtcccaccttgcctgttaggaacctgactttcttgttggcttccttttcaaattgttaattcaacattcttttctcaaatgaacaatccttttgtaaggcgaataattatcccacttctcctgaacgacgttttgcaagatttaaaaataatacttcatttgttgaatgtggagggatacctgtttcataggattcctttttagtggcaggattgaggaccgggatgacattggcttctagacaaactggtctgcctgctctccaggctgtgattgttcagttggcatcatggtagaatctctgtaataaagaattgcattaaaggaagtttgtatttcttatgaagaatcccatcaaataattcactaaggattttggaaagagaaaccaaattctttaaaaagcagggagagggcaaaggagaaggaaaaagaacgttaaacagttcatttatactaatggcccttgtgttattgtggcaaaatttcttctaaataaaagtcagagaggaaaaacaagctttgtttgggaggtgtactgtctgttctctgccttgtttttctgctctgaagtatagtgtgctgtcttgacgtaggtatgtaactgctatgaatattgatggcagcaaaagcttttttttttctctctggcctagtaaataaagcagcaaggataaaaagggatgaattgtaaaatcagtgtgctgtttttagcttctctggttcccttagaactcttaagtctcaaacatattgacaatctgcctttggtggtcagggtctgatgtgagcactgtgggttggcattttcagggatttttgcctctggttgaagtaacagagttcctttttctttgagctttcagagttaatgttatggcttcattgaggccttcctgtatctttccctctatccagtggcaatgctggtccctgctcctcagaataccgcagtggcctgagtgtgtgatcgttcctccagcagccacgcctcgcatgcctcccgagcaagcactcctctgggggatatggcagggaatggggcaacggggaatctggacagtaagcaaggaagggcatcctcgtagctctgagcgtggcatttcatgtagctgtatgaagggcatgggggaagaaggcatgggggcatgggatgagcctggctaagaacaggactggtctgaagtctagagggggcatgagtatagaggttggagatgagctaggctttctaaattaaattataaacacactgatgctggctaactctcaaaacacacacacacacacacacacacacacacacacaattcgttcactagactgttataatggtgttctgaggagcaaagggagctttggagggcaagtgtttagaaatgacaggaaccacaacagccctgtccttggaaggaagccctgttatatgaccagtgaagagtggagaatgggggcaaagactgggatgcatggccatggctgcatggtggtcaagagggaggatacctgtggcacgacaaagggatgttctgcctggcacggccggtgacagaggggaagcgattctggcagcagacagccggagcccaggggcagcacaggcaaggcttccatttaaatgcacaagggtgttggggatactgcaagcaaacatttaataggtgacggttcctcaaagggtcaggcttatgggaatcatcctaaaatttgtgtttttaaaaatgtttctgagtataaagtgttctcttcagaaacataaaatttattttcaaatacacatttgcctattgcataaaaatatataatagtgataatatatagcaaagtgctttttttccccctggaatccgttgtgaaaaggcaggggtggcctgatgggagggctgaagatagagaatcgctcttgtcagttactacttttgtgactcttgagaaattctctgtgtgtacattcaaaacttccccctccacacacctcccccccacaccaacagactaaatgacaggtaccatagtggggacatttttctggctcctggtacagtgcctgtcatttagaagtggtgttcacgtgtttcctgagcctattttattttgacctcttgccctaggcattttaatgagtgaatttcatgacctccatttctctaaggtattggtaacttttcgggtcccactgatattagtataggactctatagttcatattggaaagttacagttgctgatgatactttgttatttaagtagcttcatgccgaggaatgcctcttgcaaagttaattacacacatctctgttggtccatgtttctattgaaactgaagctgtataaagaaaacatttgtaaaagaggaaggagtcaaagtttttagacttgctgattggtatgttttccacagctcatggagttgcatgggttggaactggaaaggttctacgagtcatttagcccgtgagcagcacctgtgaggtctgtggcagtcagatgggcatggctgctgggatggatactagaggaaaggtcagaggctctgcctaggtttcctgggaaagtgcatgatgacctgtcacaagttcagccgggagaggcggcatgccaataagcaggcagggtgtttgccatcctgaatttacttcccttattgtgtggatgcaaaaacttatatccagaggaggagaaggacttgtccaaggttaccttgctactcagtgacaaagctgactgtgacttcgaactcagacataaacccaagaggaagagagggtcaaaacagatgcatcttcattttttccagaggatgaatttcttctgttcaaagacaccattggaatctttgttgtacccttgtgcttttctgggcctgatttggcaacctcaggaggaaagcatgctgcgttttgcaaatgtgtgcaaataacaaacatgcctgttatgtcctaggcagactcatcacacgcattggggcagttggcaaaatgcagtcatgcagcctggaacgaaaagtgttgcacacgtagttgcttatgagaaattcagtgttagaatgtaaatgccttcctggcccaggggcagtgtaattgttccatttctcataatgaaactttgtttggagggaaatgcttatatgtctaaggtgttgattctaatctctgttcctttttctgtctcctcttcctcccctgcccctgcttttttggtatgtttctttgtttttcttcacaggaaaaagtagaatatgccttcctgattatttttacagtcgagacatttttgaagattatagcgtatggattattgctacatcctaatgcttatgttaggaatggatggaatttactggattttgttatagtaatagtagggtaagtctcttttactttggggaaatgttgatttggaaaatgggaggtggaggttggggggggtggtggtaacaaaacagtctttttagggaatgtggttgctcttttatgccagctgttgcaccagaacctctcaggagttcttttaaggctggtgatgctgctgtcagtctctgggcagatactagtttgaaattctctcgttgttactcccgtttttagtaacatgttatagaagggagtctgaactcctaatatgagaggctttacctaacacggtcttggatctccagaaatagaccaaccctgttggtgattagagtcaaatgagtagagcttttaatacttagtgccaatgttaagttaaaaaaagtaaaaagtaataaaaccttcatagcagtaaggtactctgctatttaacatcccttgagcaaagctattaattttctttttttttttttttttttttgctgacttgcgggagaaactctggcatactactgttccattttaaataatgaaacaagtgtctggataatgtcacatatctggcataaaatgaaataagctagaaaatgcagagaagcaggtgttccaccaaaatcctgttgcaggaagaagacatcagtagttttagtgaaaggagaatgttaaaataaaaaatagtggcctgtgttattttagtccttccacacctggaaatgttgccaggaagagaaaaatgaatccatgttacaggaatgctgggtctttggaccaaatacccatgtaggaagataagatatatcctttttcccagtcttagttatgctagctgtaaagtgagttgctcctcaaattatgtttctgtaaatagcctctctgttttcatcttcatgacttcagtgaactgccttttgcagttgagcaaggtgatttttcttgtggattatccttttatcatgaatcttttgccttttcattggagactaattctgctgggtattgggagagtggaattggttgtgggccttcctaggtcctttcaacctaggaagttaatatgagatcctaattgcccagtgggacaattagacttgtgggaaacaagttagcttttcaaaccgcccccgccgccaatacattgtcatttaaggcatcattgcaaaagaagtgtaccaaaatgaacaggtagcagatatgtgccgtactttcctgtatttggtggactctgtcgaggaatggcaagccgaagccttgcaggtatgttggttctgggataatctggctgtgcctcttctgccactggactttttgttcagctaggaatggagatgcttagccccatttcttgcgtcaccgtgctatgatcacctcatatttctgcctggagacatttttcacactacagcacagcacaaggacagggaaccaagtggagcatggtggtcttattgagttaaggagacagacaagagtttggggaggcagaataggggaggggagggagctatttagagaaagagcttcataaatatgccttagagtactcttcagttttggctgagggctaagctacgcctacacggagttgtgagtccatgaggccaggaaagaccactactagggaaaagagaaagatcagggagctgtaaaatgaataataaccagggctcacaaaggactggaaggcattcaaattctgactaattagggtggaaagacctcattgaacaccctggactgtcagtagagaccccacagggccactggtagtagtgctaaactggctctagagcaggggctggcaaactgtggccaatgggctaagtcctagcccatctagcctgccacctatttttataaataaagttttattgtaacatggccacactcatttgtttacatagttcagtttgagtagtttaggtctacaaaacctaaaatatttaaatatttactatttggccttttacagaaaaagtttgccaattgctgctctagagtacagagactacctgaaatccttgcttacaatgtttgaaaagaagtctgaaaagaagcaaactaggctgggcatggtggctcatgcctataatcccagcactttgggaggccgaggtgggtggatcacctgaggtcgggagttcaagaccagcatggccaacatggtgaaaccccctgtctactaaaaatgcaaatattatctgggtgtggtggcgcatgcctgtaatcccggctacatgggaggctgaggcaagagaatcgcttgaacctgggaggcaggggttgcagtgagccaaaaccatgccactgcactccaacctgggtgacagagtgagactccatttcaaaaaaaaaagcaaactgatatgctaactgaactgcctgccagaacataactcaacattctttaaaggaagacaacaaaatccagacactgaacatatgaagaaatgtgacccataaccaggaggaaactccgtcagtagaaacagatcctgaaatgacagagatgatggaattagagaaggacttcacaaagctttaaaaactgctgttataaatttatggacttaaagggatacctgattatagtaaggaaagatgggacaatataaaaaaaaacaaatggaactttaagagatgaaaaatatatccaaaatgaaaaattctctggtttggcttaacctcagcttaaacactatagaaggaaaaaatatcagggaatttgaacatatggcaataacatgaagaataatgattgaggagaaaatgaatactgcctctgtggcctgtgggggaataacaagtggtctaacatatatatatatttggagcctcagaaggagaggagagaaagaggagacagaaaaaaaattttgaagaaacagctccagattttccaaatgtgatgaaaaatgaaactcacaagaagctcagcaaagcctgagcaaaataaacatgaaaaaagccacatcaaggcacatcataattgtaatcaaattgttaaaaaccaaagataaggagaaaaccttaaaacagagaaaagaaaatctcagactatttgtcaacaactatgcaagccagaagacaatagagagacatctttaaagtactggggaaaaatgtcaacctaggattctcactcagtaaaatatctttcagagttaaagtcaaaatcaaaattttttcagacattctagagtttcagaattcatgactaatagacctgtacctcaatcagtgttaaagacagttcctcagggctgaaggaaaatgacacgaggtagaaaagtggatctacacagaaagaaatgaagagtaccagaaagtggctctacacaaaaaagaatgaagagtaccagaaagggtaaatacgtgggtacatatacagatatttctcccctcgtttaaaaatttctttaaaggtaattatttaaagcaaaaataataacagtgtattgtggtgtctatagcttctatagaaataaagtacatgacaatggtagcatgaagaataggaacagggaaatagccatatggtcttgtgatgtacttatacagtagttggaatgattaaatattatctgaagatagactgtgatacctttaagatgtatattgtaaaccctagagtatggattggtgagctacaacctgtagaccaaatctagtttgagcctttttttcccccaccattgacaaagtattttatttactgcctactttggcaaataaagcttcattgtaattcagccacattcagtcatgcctatggctatttggtattataatggcaaagttgggtagttgtgacaaaccctatggcctgcagattctaaaatatttactattcggcactttatagaaaatgtttactgacacttgccttagagaagccactaaaaaagaaaatcccaggtctatctaataagcctattgtagagattaaatggaatttaaaaaaaacccctaaatccaaaacaggcaaggaagaagaaaaaaggaacaaaggacaggacaaatagaaaacaaacggcaagttgctagatttaaacctaggtaaatccttattaaaatcattatcatgaagaaaggataatggcctttctttgtgtccatgtgttctcatcatttagctcctacttataagtgagaacgtgtggtatttggttttttgttcctgcgttagtttgctaaggataatggcctccagctccatccacgtgcccacaaaagaaatgatcttgtccttttttatgactgcatagtattccttggtgtatgtgtatcacattttctttatccaatctgtattgatgggcatgtaggttgattccatgtctttgctattgtgaatagtgccacagtgaacattaacatgcatgtgtctttatggtagaatggtttatttttctctgggtgtgtacccagtaatgggatttctgggtcaagtggtagttctgttgttagctctttgaggaattgatacactgctttccacaatggatgaactagttcacactcccaccaacagtgtataagcattcccttttctctgcaacctcgtcagcatctgttattttttgactttttaagagtagccattttaactggtgtgaaatggtatctcgtggttttgatttgcacttctctaacgatcagtaatatgaactttttaaaatatgcttcttgaccacatgtatgtcttttgaatagtatctcttcatgtcctttgctgactttttaatgggatttttctttttttcttgagaagttgtttgagttccttatagatgttggatattagacctttgtctctcattctgtaggttgtctttttaccctgtttcttttgttgtgcagaagctcttaagtttaattaggcccatatgtcaggttttgcttttgttgtgattgcttttggcatcttagtcatgaaatccttgctcattcctatgtccagaatggtattgcctaggttgtcttccagggttttttatagttttgggttttacatttaagtctttaatccatcttgagttgatttttgtatatagtataagaaaagggtccagtttcaatcttgtgcatatggcttgccagttatcccagcatggtttattgaatagggagtcctttccccattgcttgtttttgtcacctttgtcgaagatcagatggtcgtaggtgtgtggccttatttctgggctctctgctatgttctgttggtctgtgtgtctgtttttgtatgagcaccatgctgttttggttactgcagccctgtattataatttgaagtcaagtagtgtgacacttccagctttgttgttttgcttaggattgccttggccatccaggctccttttttgttccatatgaattaaaaaaattttttttctagttatgtgaagaatgtcattggtggtttgataggaataacattgaatctgtaaattgctttgggcagtatggctaattaattgatattgagtcttcctatttgtgagcatggtatgtttttccatttgtttgtgtcatgtctgatttctttgagcagtgtaaaaccatgaaatttatagtagaaaatattggataaaatctttatgacctcagtgtagccagagatgtctcgggacacaaaaagctccagccatgaaacagtaattgaaaatgttgactttatcaaaatttaaaacttttcttcaaaagacagtgtgaagacaatgaaaaagcaaggcacagattgtgaaaaatattcacaatacatacacttgtattcagaatatataaagaactcttacaacccaatagtaagaagacaacccaataaacaaataggtaaaagatttgaacagatcttcacaaaagaagatatgtgaatcatcaacaaacatctgaaaagatgctcaacattgttagtaattagagaaatgcaaattaaaactacagtgacagtactgcatacccactagtattactaaatgtaaaaagactgaacataccaagtcttaaccaaaatatggaacaactggaactctcatacaccacttgtagaaatggaaaatggtataatcactttggaaaaaatgcgcccatttcttacagtgttaaacatagacttaccatatgaccatattaccagttctactcttaggtgtttatccaagaaaaatgaaaacacatgtccccaaaaaaactttattcataatagagaaaaactggaagcaacccatatatccctcaacgggcgaatggataaactcattgtgatgtatttgtgtaatgggatattacagaacaacaaaaagaaatgaactgctgataaaacaacgtggatgagtgtcagaaacattatggtgagcaaaagaagatgagccaggagaacatactatgtgattccatttatatgagttctagaaaaagaaaaaaaaaaactctaccgataaacagccaatcactggatactcaaggctgagcttcaagggaagctctgtacaaggctgtgcaaaaggggcacaagagaatcatttaaaatgttgaaaccttccctatcttgatcatggtgtttgttgcttaggcttatgcatttttcaaaacccattgtacactttaaatgagtgtgttttattatagataaattaaactgcaatataaagtgatttaaaatgcaaaaaaaaggaaactgaagtagaactggactctaagaaaaacttcagaacatcagattattttttatctaaaatatgtatgaaattggagtcaaagaacagaagaaaggttttaaaaaagaaaaggaagaattatgatgtcttcatttgaatcaaattcctactcactacagtttccaactacagtctgtatctcaatccactggatttttccattccaacagtgacctattgcttttgtcaagattcccaatagtcaagacattaagaaagtaattgatatttctaaaatgttaactgttaatgtgaccacaagaggactcagtgtgtctgccagagctgaagttattcctttagagaaaagtttgatctaagccaactcttatcccatgcctccaaatttcaataaagatatatttcaagcattcaggctctattacttaagctttttttgaagaacgtgaaggcttgtatgtgactcctcattctggtgcttctgactttagtcagtttagacagctccttgtcttttttctcccaccttggggtaaacttttaataacaatctagagtcagttactcctttctcatcctgtccttatctcttcaggcccgtggcactttttttttttttgagaggcgtggtggtgaggaacagaatcacggaatattagagtggaaaggtcattctctgagtcgttaaatccagttttgtcattttatagagaggagaactgaggcccagagaaggagagggactttcctaatatctcataactcttaggagtggaaaccagccccggccccttgcagccctgcactgtgtgggaacacagcctgcttctctctctgacttggcctctttggtggcaagagagagacatttttcatgtgttttcaaggacattgctgaagaacaaggaataaagggaccatgatgtatatgttgcaaaacatggatacttgaaagcagtcttcagtcactacctgcataaattactttgctaaccctttggggtgaaaattcctgtggcttgcacatttcagaagagtttgaggttttctttctttctttttctttgtttttctgaagctatgaatttgttttggaggagagacttttcactttagccttgctgcagggatttacagtaatcttttaaaaactatgctgaagagagagaagcctgtcataaatttgatctatttcctcagtcataactagggagagctcaccatctgaagctttgtaaaggtagagaccgggcttgttttccctcctggctgggttcgttgctaattgctgtactgttattaaaacaaagggctgatctataaatgccccagaactacacaactatacccaatcagggctgtaatcagaccacccgatgttttatggactcggtgtcttggcaatccagaggcacgccagtgggggcagtttctgctttgtctgctcattaaactttggacaccttttctttgttgctgggccagtcattcccacaatctgattggccagagttgatgctgtttgaaatgggcaaattttatacttactctgaaaaacgagcaataattccaaagagtatttgtttaaaagagcaaaagtcactgttaaatgagcagattgcctgaaaatagatttatctgaacgttctgagactaggaaaaaatttattgtggctgccaggtacaatattattcacatttcaagagagagaatgatgatattaataccttaccttaggtaactgcctttagcctttgcacagctccttagtatctgtgatttacatcctccaaatatccctatgaaggtgaaggttggggtgtgtgtgttagtgactacattgactacatataacatattaagatgtgagactttgaagtcattcattgattgattcatcagatatttttggagtacttcctatgtgtcagatactgtaataggcactagactagaacagaccacatgcacaaatgagcagaacagactaaaactccttgctgttacagaacctgtgttctagtggggtccacatgcctgtgtttacatgtgttgctgctagttgtgtgaccttgggcaagctacttattcctatcgagtttgttttctcgtgtgtaacatggtgttcataattgctgctgcataacattttgtgagaattaatgtgacaatgtatgtgcagtgcttagcacatagcaagtgctcatgaatggtagccaccaagatggctgttgtcattttagtttgcagcagttccacttgtcatcattgagttcccagggagtcccctcttctttgggaacagacttgctctctgttgctccattgcggtaaaaacagatgaggttaatccctgtcccaatcattttggagatggcgtcgtttgtattccaattccacagcccagttcttgtctttgtcttccttttatttaagcagcagccacacagaattagcccttttcaaaaataaataagattatcatcctgttttgcgtccctggggtaacagactctaacatttctttctctttctcttctttcagattgtttagtgtaattttggaacaattaaccaaagaaacagaaggcgggaaccactcaagcggcaaatctggaggctttgatgtcaaagccctccgtgcctttcgagtgttgcgaccacttcgactagtgtcaggagtgcccagtaagcacttattgtttcctagagtcaggagtgtgctggttttttcttccaggtgggtttcagaatcactggtgctttgaggtgagttgctctgtgccagccaggggtcagcagatgaccatggcctccttcacagttgacaggacactttggcttgcactgtcacgttggatccccatgacagaatgacaggcagttattgtcattctgattttgtggacgaaagaatcttctcttgcagaaagacaaggtgaggtgttggggtgagaccttgggttcaggcctttaattccagtctatttttcctctctggcaacatgctgccatccacgcctccactcccaggcctgcccctctgaaagtggtgggtttgtggatgagggtgttggagtacttagctgcgtgcctttttttttttccccaaatggggagcatcagagggatggactcctggaaactctgattagatcctctactatcaggaactgtgctacccagctctgggggaagggatgaatgcttcttacctggtgacagggcacaggagtacctgccttgaaggctgttgtgagaactgagtgagataatggagggagagcccctaacaggatgtctggagcacagaggctctcagtgggtgagagagagagttttagccgttaggccctaccataccactcagtgccaggccccagtgtgcttctggctccaggcccccaggccaggttaaatcatacctgagttggaatagatgccctgtctgtgccctggccaacagctgcagcctcttatccttccataaggtgtttggggttgcctcactgggctctgcccctgataggactcctgtgttggggacttccatgggtagaagtcctaacacctttctgagggctggtgcgtctgagcaagaatatgggattgcagggtgtgcctgtttttcacaactcataaagccatcagaagaacacagatcacattttttgcctctccagaagttcttcatgaaatttttattaaatttgttggcacttagaatgcaccaaaaatcctctggaaaaaaaaatttccaaatttaacattttaaaatgtaggaagtggtgttttatgtgtacttgtttttccagatggttcatttattttcattgaaaaagatcagcacaagtcaaaaccacagaactgtgtggaatcaattgagaaaaacagaaataccttggaaatgactggctctgttaagtgtaacacgattaaatgagaagttcagtgagcaaacatgttcttccagatttagttgttatagcttaatctaatttcaaagtaaccacgacagctttttcccccaaagagcaaataacaggacagcctgtctatggtatgtgttgtgtgcagactttgggggctgtggctgtgtgcgtgtgtgcgtgcgagcttctggccagtgaaaaatccaagaactcacatagcattgtgtctgcttccttggctaatgaggtttttactaaactagtgcagtgctcctagatattgagaattagttttaaactgtatttcttcctttccccaacagacatcactgtttgaaatttgatagggagatttgtatgtaactctcccccaggtcagcagggaaaaatgtgagtctgagtcttgtatgaggacttttgagcttatatttttaaccacctaggtagggaacatcccagtctctcatcaaactcaaataggcttttgaagaaaaggatcagaggttgtcggatgtgctgtttctagtgctggttggcagccgtggcctgctgatttcttctctagtacttgaagttgttaaaaatgtccaggaatgtttgactgtttacacttatcttggaattgtttagtccctgctaaagagaatccagactgttctgtaagacataattttgtgtgcatgtgtgtatggaaatatatattcattcagtgaaaggtaaatttatttcacaaggtggtgaatcaggcatttgtggagttcttaagcacccacattaagagactgagggagaatgggcaggaaccgagaacccaccctggagaccaggccttctgacccctgtgttgacgtcccccattctctccacagccccgcgacctcagcactactgtgctgctcactgtttaacttcttaccttctctttccctgtccttccgtgttggacagggaaacatttatcaaagttcaagaccatcaaagtggaaaagaatcctaaagatcatctggtctacctgcatcttttagacaaggaaactgaggcctgttggaggtagtgactagtgtaagttctcacagctagtgagtagccagacagaaccagacccacgatctccacatttctgacccggtgttcttcccacttctgcctccttgactagagtcccatgagatccactgagatctaccgtacatgttgattatgtacaaaggagcggaatgcaataaagtatacatgttcacagtcggatacaactttatcatctcataaatgtgacaaatctgaaatacagtagttactctaaatgtaaaaaatattcacaaagcttactgccatggaatttagaagagctaactgctgggggttagttttgcatggcccattggtgtctcaagaaaaccaaaacaacgatagaaacctggccatggggattggaacgggtgtcgtcttttcctttccatgtgttccttgtaggaggtaaaaatattgaaaatcatcctaattgatcatttttgaaaaaaccatgtggacatttacatatccaaagatgtagcacccagagttttagttgtaatagaggttgtagcaaggcagggtcgtgctgagtctgaaatcctcttactgctcttccctcaccatcctctcccctgcctcctcctgtgctgcttatcacggtaaagatttgtcattattgctaagtcttctctttgcttgctgtattctggtttccgatgtaagcatctcagcttcttgcattctttctttcctgactatgtattgggaaagtgagatgatagcagaagatggaaagtttgaaggtggagagacaacagggaaggacagggaaggagaaggtaagaaggaaaagagtgagcagcacagtcgtgctgaggtcgtggggccatggagaggatgggggatgccaatgcaaggtcaggaggcctggtctccagggcaggttctggattcctgcccattctccctcagtctcttggttcctcacaaccaatcctaatcctgagtgctgcccccatccttcttttcatgacctctttttctgtcccttggcgggtagccttacccacactctggcactgagtatgactccatgggtagcttctattaggttggtgtgaacgtaattgcggtttttgccattgaaagtaatgggtctgagtctgaggatttcagactcagcaagaccctgtcttcctaagacctccatggcagcaaaagttttaaatgtaggaaataatcgtctctctctctctctctctcttttttttggagacgaagtcttgctctgtcacccagactggagttgcaacctccacctcccaggttcaagtgattcccccacctcagtctcccgagtagctgggactacaggcgcacaccgccacacccaactaatttttgtatttttggtagagatggggtttcatcatgttggccaggctggtctcgaactcctgacctcaagtgatccatctgcctcggcctcccaaagtgctgggattacaggcgtgagctacctcacaagggcagaagtaatcatttctcatgtgcctgtctctcaagaccacatttcagcttcaggacacgtctaccttaatgttacataataccaacatcatacttaacaaggctcaagtcagtctcaacctcccccttcccctcccacctccctcattcctggagaacctccctttggaatgcttagttttgttggggacactgggattttgcctcaagaccctggctcaaataactggtgtgctccataggtaccttcctctcattctgactcagttgctgagttctggtctcatcctgatcttcaccctcacctaccccagcattcttgaactacctctctgtgtgtctggcctgctgctgtcctgttggtctttctaaagcagctgccttttgctagtgatctaaagtttggcttcatgacctggattcaacacccacaaccctggctgcaatctacttttctttcgtgattttcttttccactaaccaccaatcaagactcaccaccctcaagcccatactgtgctactctcctctgtgcttttggtactctgttcttcttccctgaagttgcctctctcccatgcccacctgtggaaatccaccccacctggcctttgggctgtgcccagagagaagctgcctcaggaccctttcttcaccccattcatccctacttgtcacctgcatggaccttgggggactgaacaaaggatgatgaacatgggaataaagacaaagacaaaagagtatatttggaagaaggggtcagggggctccttgcttctagtgaacaagagccctgagcttcagagcctttcacattttactgggtaaaggagatagggagagaggggagttgttgtcggtcagcagcttgatttacagcagacttgcaagactgcattcttctaacaacaggctctagatgtcccagtagataacctcaatgagcacggtgccagggagtgattgccctcagcaaacctggcggtaggcacagtcgtgagtttgcccacatcctgcattcatgataaacagtttgctgtttgatcatatagcctccagtggaatgctgagttggtcacaatccctttggccttttcaactcccaacacctattaattttaactattgggatatttatatagcatctatgtgctaccccagggtagagttatttgtgtttaattctatgtctcctagaatataattttttgagggaaaacattttacataaaccgtcttcatattgctccaaagcaccaaaccttatgatttccacatggtagatgtttaagagattttgtcagatggatgaagaaatgcataaatgaatgatgaactttgacattgggcagtcccctccctaggccttagtttttccctctgtctagtgagggagtttgactagatgatccttaaggttccttttcagtctatctcacatccaggcttaatattaatgaaaagctttgaaatacctctttgaattttattactatgtgttctaagtaaaggaggcatggttaggaattatatatatgattcattggagtgccttcctggctcacaaacttatttttttttgtctttcctaggtttacaagttgtcctgaactccattataaaagccatggttcccctccttcacatagcccttttggtattatttgtaatcataatctatgctattataggattggaactttttattggaaaaatgcacaaaacatgtttttttgctgactcaggtgagtaatgagaattgtagctaacttaactttaaaatttttttgttttccccaaagcaactttcatggtttggggaaaatctaaaacaaaataggaaaaaaaatgcccaatataccagcacatttactgagccagttctcagtgtgagctatgttcagaatagatgagaattcagtctccctttccaccccgatttcctgtgtaatgtgtcctggcaaacaagataagagacctccaaagtaaaaacatgaggcaaaccaacagcattgtgctatctaagcctaaggaggatgctgtaagcgcaggtgcagaggaaaagaaccatggatgctgacaagaggaaatggcagattccgctaaggagggagcatttgaagggaaccttgaaggacaagcaggatcctgaggcaacgcagatggggcggtagggtgtcccgggctctggcaagggttctcaccttccgctggcttggatttcctgatgtttctgtcctgagcggtacagcctgtttgctctgtttgcagatatcgtagctgaagaggacccagctccatgtgcgttctcagggaatggacgccagtgtactgccaatggcacggaatgtaggagtggctgggttggcccgaacggaggcatcaccaactttgataactttgcctttgccatgcttactgtgtttcagtgcatcaccatggagggctggacagacgtgctctactgggtaagtaccctggggagagagtttatggagtgttctttgcttggataagtgggttttgtgagctagagccactggagaggtggctggaaaagaaaccctgaagtcagttatttgggaagggaagcagatgctgtctttaccagcagtcttcatcatcctgctcctcgagggccttagtttcagttgcaggaagctgctgcgcgatgttggcttctggctttagtcctctacttcccagtgctgcctgaagacctggtgccaagggtgcccagtggtcccctttggaggaactccaggaagccagggctatcctgattcaactcttaagagagccaaagggtcactttccaggtaaggaggctcctggactgccacaggctaaggttaatcatttatacatcaaggcaggttgctctactagatcctaaagggaagaaagggaatgtaaatcggatccctttcatgcttttcataactcagtataaccttaaacccagtgtgagtttctcccatgataatatttcccattctttagtattactataaatcatcccagcacaaaaccttagctgtcttcctttctatttgaagctacagacctctggcagaaagggtaggaatggcacgtagacttccagggctggtggacccatccagcctgccatgaaaacagttggacactctttcaaggcgagggtctgattcctcttgttcctgatagagccagaaagatttgctgtataaaaataagtgctatagcattttaacagccatttcccagggctgagtttgttagaatgcaaatgaaagctcacagaagtttagaaattgtttttcacggtataagagttgctggtaaagacagctaacatgtagattttgagcctaaatccaagtccaaaggggagtaaccaggattccaatcatgagttgttaaaaggaaattagtaataaagtagttctgaaatcagcagcttttagacagaaggcctgtaaattgataagtagcttctggtagtttctaaattttagatacttttcaggatttcctatactccataacttcaaagaatgtaacatataatggttataaataggtttttgctgcccttcagcagctcacaggattgtagatgtccctatatatttaatatgaggcaaagaagttatatttttatctttaatccccaaagtcagtctagtttgatcaggtttaagcatcaccaacatgttatatcttgtttttcctacttccctttctttttctgattgtcataggagtgtgagtgtgtgtgtgtgtgtatgcatgtgtgtgtgtgtgtgtatgcacatctgttatttatattcataaaacgtcttttcataaagaggaaggaggaaggagatgatattggctgagccaggggcatggcttctgtatgcaggagggccctcaggttaggtgaagcattcatttttgctattatttcctaaattgcaacttctagtcagattagttgagatctcaattccagtcttcccttgaagtttttcataaatagaaaaagcatcatcaaaatagcccaaactgatacttcccctccccaaacagtacataaaacaacattttgatttttttaaaaatcaaaatctgtgactcttctcagctttgtttttctctctattgacatggtgaattgtcagctgcagagccaacatgccttgactgatgaaaaattttatactttatgttatattccttcacatcgattctcagaattttcctgttgccaagcaagtgtaaaacctgggagtagatgattaaaggagagggaacttcaggctcctagaagcaaaagtttccgcttactttcctgagaaggtttaaatatcatctaggatgatataattattatttttattattaatatgacaatcacgtggttaatactttgacagtataattgcactctccataaattacacagcatctttattctggtggggatctcaagccattcataaactttatcccagtctgtatccctttatagaaggtctgggatcttgaagatggagacagtggcgtagagaccatggaacattccccgagttctacagcaaatggttgtggtccttgatctagaacagtggtctataaaccttttcataagggggcaaatagaaaatgtatttggccttgcaggctacatggtcacctcagcaactgttcagcccttccactatagctaggaagcagccatgggcaatacataagcaaatggatgtggctttattctaatcagacttcatttatggaccctggaatttgaattttgtatgatttttctgtgtcatgaaatattttgcttttgattttttcccccaccaactatttcaaattgtaaaaatcatttttagcttgaggccatataaaagcatacagcaagctagatttggtctgcaggtcatgctgtgggaccccctggcctagactagaacccagcactctttccttggcattcttccacctgtcagcagttgatgaatccttccagaacactagggggcagctaagtaatgtcttcccgactgttctctaagattttactctctgaaacacatcaggattgtttttaattacctgttgattgcatttattagctcatcatagagataggcaggggccaaggaaccaagccttcctaatatttcatgggccacagtcagctggaagccacaccgctgtgatacacagcagaacatccctgcccagcatggtgcctggcaccgagcaggcactcaataaacacaagggatggtcatcatccttcaagtgtaccaggcatattgcctcattagtgtagatgtgccatgtttgaatatctatttttatccacaactagggcataaaggggacatcttgggagataaaaagagattagattttaaatattgactacaagcacatttctgaatcctttaggcacttacatatggtggacaaagtctttgcgggtcattgttttgcatctagtcaagtttatattcagtcagcgttctcaagctcatttatgccttgcttctcactagtgtctggaaaatgtctggcagggtcttgagaagggaagtaaaggtgggtccaatatgtagaaaggcacacttagaacaggactatttggatgtgtgggaagtgggatcattaagttctggtggaaagaaacctatggtagagttctttgataaagtgagttccataaatataattgagctgttgtttgactcacatgtgagtgtttgttgctcacagaggcagtagggtgtagggcagggaaagagtgtttatttagcctggttgtgtgaccttgagtagttcatggaacctctctgggcttctcaagatgcagaaataaacttacatgatttaatttttcccttcaacttagaggaaattttttttccttcaattcaaagaaattgtttttaaatgcaggaaataaaaagtattggtttcaggagacagctatccagataaataatttcggtgtcttgtcttagcaccaagctcttttctcagtgcacactcctacggaggtgctggctgtcagaccttcacgggaagtactcatggtcaagctgacagtctccttcattcagggcacctaggaaatctctctgtaaccagccgagggcttgcctttttcttattgcatgctctggggtgttaaaaccagtataccaagtttccagaagtgttttcagcagctagaaaaacagccttgcattggtctataacttgagacatgaatatgcatttcaaccttttatttttattttttacatttttttgagacggagttttgctctgttgcccaggctggagtgcaatggcgtgatcttggctcactgcaacctctgcctccggggttcaagcgattctcgtgcctcagcctcccaagtagctgggattacaggtccttgctaccacgcccagctaatttttgtatttttagtagagacgggtttcaccatgttggccaggctggtctcgaactcccaaactcagggtgatccacctgccttggcctcccaaagtgttgggattgcaggcgtgagctgctgcacccggcccatttcagccttctaaaagaaggaaaactgaagctaaaaagaaaattatttcctgggcaccagatgacaccccttgatgactttgatataagttttttaaaaattagtctaaattgaagtccttcagtggaagccagtttcttcattgttgataaagaccatacaggcaaaatcccaagcagtctctattttcacgtgggtatttttgggaacagcttgcatgttctgatttttcttttgtatatggtaagatccaagaaatgcttggctctgaaaagggacttggattgagaagggttcaatgggagcaagaccgttctcagagccgaagcttgtctctcttgccccaccttctgacttagagatttggaatctccagtggactgtattcatctccagccttcccctccaggcctcaactgtcattccaagtgatacttctgatttgagcaaatgtgaatctgatgaacacctactcccaagaaattaaaagggttttaaattttttaaaggaaaattttccctcccaagtagagaagacagctgttactagagccattctctggaacaccagactgaggcctgaaggagggttggtgaagcagatggctcagcagatgacggttgctagggtcatggaagagtgaggtttcctgatgggagccctggacctgtctgccctcccgtcaccttgttgggcaccttctcccctgctgcatgcacctctgttccaacacagagggaaacaagcccaggtggggctctgtctcaggtgctgacccaggccaggcacaggccaccacaccaggcagccagttccttcttcatatatgggtttttcagtaagtttagtggtatagttgctctggatgaattaccctctgccttcctgctgaaattagtttatccaacttaattagatcaacaattgcagccacagcccaggctcattcattactctaattgccaatgtaagatgtgcagactgatatgagttctattaagcacatcaattttcatgtggccaaacaggtgtttcataagggatttaatgccctctccctagacttcagcaacagatgttaggtaattttttttaatgttcactttccctatttggcttctcgaggcaaacattgtgaaatgcacgagcctcattctgtaaagttaaaacctggagccagatcatatgcaggaaagcacatgcttaacaccctaagggcttgcacctgcaaggcaagagcgatggctctatccagactgtttgcagttctcattggctgaaaattctgggtgttgtggcagggtcataccttgggccatccattctgtcccctgactggttcttaacacctccttcctgggaaaggtgttttgctgaatttaacattgacctgtgctgctggaaagttccatccagctgtgatccttaaagccctgtttgctctagcttcctttggccaggtctgccagggagactgtgtctgaatgtgcagcatgagcttgtccgggaataggggaatggggttcctcaggccacaccctttcacctctaaacccagtcagctcacagctggagccagtctcccaggggggtcatctagatcaaagctaagtgtggagaataagggctgcttctcctttctgtgggtgcagctaagaaaaagcccattccccaaagagcccgtggcttgtgtcagctagttgaccttgaaaaaatttctttttcacattcattttgctgcattcattttgtttgcactcacaggttgcagataatccagatctaaggtgggtttggtttccttgggtaggttggtttccagtagaagattattttaggagtttttaaaaagagtttatagagtcagatggtacaagtttgtctctataattaagacttttccaccatcacaaactttaaacacaaagtctaaaatcttgggcagcatagaaaataggttctagctaagcaggagttttgtcctctaccaagacctttcctgaaaatcacttatcaagacagtttcctgtaagaaaaagccatatcccagctgattttccttcctggggccaaaatctgctattattcggcctgaaagccttgatgactctgtgtgtgtgtgtgtgtgtgtgtgtgtgtgtgtgtgtgtgtgtgtgtgtgtatggatgcttgtgtgtgtgtatggggaatatgtgattaatgtgtgttggctgctgttgtctctgatttggctactgttgtttctgatttaaatctaagtaaatgtttaattaaatgtatagaatgctgtctctaatgtgaccctctctccttattaaatcctcttattaacccactcctatgagaccatcttatttcttgcagatgaatgatgctatgggatttgaattgccctgggtgtattttgtcagtctcgtcatctttgggtcatttttcgtactaaatcttgtacttggtgtattgagcgggtaagctacacctctttcatcttgaaagcagagtcctgaggacagttgccaagaccacacaagctttgctggatgagggccgccaagaggggttgccagacattttatgtgtcctctgagatgctttcttttctgctgaggcttcccaaatcaagctgtttcctggaacctcaccaggcttcatgaaggagaactatagaacgattattgaccagaaattaatcagcattgttgcttgagatttaaacaatttccatagcatgccctttttttgtctgttctaaagtgagatacatttataattgctttatttgtctggatccaaatataatgcagattaattgttataaaacgatagcaaaatgagctggattgggtgggcttttggtagtccccatttgtagatttcagccgctgagcttgtccttatttgcagaaaaaaaaaaaaaagggaaggacctaggcccagtccctgtcctaggagcactaaccttcagcaaagcactgagaggtttggcagctgcaactggggctctgctctttagtaaatggataactgataactgatctccttacattttacaggtaaatgatgcgataggatgggaatggccatgggtgtattttgttagtctgatcatccttggctcatttttcgtccttaacctggttcttggtgtccttagtgggtaagcagtcggatccgtgttgcaccttctcctgctgccacgtgtgaggcaactctgcgtgtctcctagctgctccctgacagcttctctgcatgtgtttggactctgatgtcctctcagtgtgttgcttttggattgaactgtgattctttctgcctgtatctgtctgtgagattccgtgtttccaatgcttgccaaacactgttaatttaatgaaaacgttcccccaaagccagttgtgttagtatgtgaacgtgtagaggtggattacaagtgagttaaaggaattccagccttggtctcccccaggaaagaggcttttgtcccttgtcattttgtgtctattagtacataactccttgtcgttttgtgtctattagtacataacctggcccctttaggtcaccacagtgcattataaatacttccaggggagttttagattttactgtgaaggagaaataagcctcaagcacataaatactggacagtttcaaaatcttccttagattgggattctttattagcttggtgttctagtgctgtcattgtgagaactgtccctgtgattcagttttaaccgaaacttacagaatccttctcttaatgcagagtgatgatcgacttttgtgcacacatttcccatggccttacagagaccccgtcattcagtcacgatttttgaagtttgcttgtttatcacttcctctctatggattgactctccataaagagggtgcaacagattctggcctggaaagggaactccttatgttgcaggctctgccttgcccgtagctggagatgccatcccagaacccttgtgggcagccctgcatccacaccgcctctcagacacccccagaaggtggggtgctacagagaagggagctgggggctgtatggctctctcacaatcagctccttcatacagccattgccgggttgtggggggcaggcaggataccaggaggccaagaggggcccacgtctcccagaggagcctctgtcactgcgctgcgcccaggcaccctcaggaagtagtgttgatggatttgattccaggcaagtttatctcctcctcactcactttatcttgctctttccgaggctgtatctcggggaagtgatgtcttcatgtatgctgagttagtgaaaggctttaatcgcatttttggaaacactgccttttccagagcagaaagcagagtgcgtttatccatctcggcttcctttctgcatcttcccctaaacctgccctggattgaatgtagtcagttccacaccagggacgcatactgtcacaggaagtccctatgtagagttggcccaggggccagtgcccgccagagagaggagtgggggctgagcctgggatggggccacataaccctcccctgcctgagccgcctcctgtagatgagtggctcctcaagcctccggcccttccacctcaacgtgagaagtgtctctctcctagtaaacctcagtggccttaggctagggttggacatgtgagggtggtgtctattcctggagaaataacatcgcatttgattttgccacaggagctttctatacaaggttaacagcaatcctgttgtgaattccttggcgcctcatgtctcctaaacccagctaaactgacggaggccatggaaaccactaattttaacagtgccggtgacatcccttatcttttagctttcccaggcaggaaccgttgccccagcagacatgatgaagtagaggcaggagccagatcgtgaggtgcttaaaaaaagaaaagagaaaaagatgggcgggggggcttcccactatcacaaatggggattaaacctgcaactccgtgggaggtacccaaagctggaggataaaaaaggtacactccttcatggaacaaccagtttactgaaatatattttggggggaaataatttttttaaaaaatattttttcatcaaaacaaaacttagatccctgatggaggagactggaaatgacacatgaaattataaaagaaaacccgagacttctctgcgatttttaactgtcagtgcgggctgtgctcaaacccctagaggctgcacatgacctcctctctactcccccagaaggcctccggtagggctggtttgggtaaaggcagaaccatgtctgcaaagcacagcctcgcagctttgttcctgatttggccagtatttcctgagatcctgtagagtgcccggctctggtccagaggcgaggggtgccaggatgtctcagacacagacagcggccttgtgcttaggcgttcattatctcatggggtagcccattttgaagcagtgcagaagggcacatattcagtagaggtgcagacccagaggctctgtgagctgcactagagagatgaggaggcatctcccccggcgactgacgatgggctggcatgcctccacctccgcccctccgccccctcgccctcccaaccaccaccttccctctctgcctgctactcccctcttactttcccattgatatttttgttgttgtttaagcaaattattattatttttttaaattttagcctcaagagtcttcataattttttaagggaacactagaggtactgcaaaaccagaaggatataaatgttgagaggaagacaatttgtgttgcatagaccctgagggactgtcagaccaacacaaatgtaatccgctaagcactgaattaaaacgccctcattttagaaaggctggtcgagaccatgtgattgccttctcacgaggaaatgttagatggtgctgtatgtcttcaagtctgtcagccatttggaaatacctgtatctgtttttgctccttggctccgtcatgtgtgtggccatgccatcctattgtattcttgaacagactttaatctgcacattggatttggtgtttatttgtaaagtgttgtaacactgatgctttgggaaaatctttggttttataacagtcttttttccctcaaggtaagtatgaagtttatgaactgtaaaccctatgcagccatgcatgaatatagatgaatacttccatctctgatcacagtgctctgtgggaggggctgagaatgtctatgtctaatgttgcaatttaaccttaagttgtcattgaggatatgctcccattatgaccaggaattggaaagaatgtcttctttaagtctgcaattcagacatattacacgtggtcttctagaagtttggcaatttttcacttttcaaattgttaattgaactcccttttgaggttttcatctttagaatcatgctagattcccagggggaccatgggggtcatgggtggtaggctggttggctctgcctccttctccatttcagggcccacctgccaccagccatccctatggtggcagtgtctgagcttgcaagatgggggacgccctaggctcccaggatgtggctccaacccccaggaagggggctggaagacttgggttccgtcctgctggagtcccgcgttcactctgggacttcactgagttaccctgagcctcggtctctttgtccttcaggatatcagcgacatcctgtcttgccgtctcccacacagggtggttttcaatcagctaatgactgtagaagtgcttctaaaaatacataaagggtttttctaatttaacatatccttatcttaaatccgtggatatcccccactcccctcactgggttaggtgggaagggtgcagggtactctttggaaattctggagtgtagcattttctggatttcccagcaggtggccacactttacacacacatcaacgttgtactcaatgtcacccaagaggtggctctggagaatgtggaagcactgtgtcagctgcaaagtattacgcaggtctaagtcattgttattatatatttgacaatgtttttttgcacaaattgaggggaacggcatttctattacatagtggttaagcacaccagctttagaatcagacaaccaagtcttgaatgtttgttctaccttttccagttgtgagatttggggcaagttacttacctctttgagccttactttcctcatctgtgaaatggagctcatcacagtagcagcttcgtgaagttcagtgaggactcagtgagctgaagaatgtagagggcttggcctattgaaattatgacagttcaggaagggtgcatctcttcctggatttgatgcaagaaaagaatcgaatcaattcagtcctttcaaactaattaataatagctggccaagataggtctgtgttagtgaaaagcccaagttatatttttaaaatgttttattatatatataatgacataagctactgctgactaaaggatattactacataaaccccctcctgggcttgctttaaagaatagatcaaaatcatttataattcgcttatgaattcaaacctttggttttggcaacaacttatgaaaaatatttgaaatactttgttaagtagatcttgtatgttgttagacaataaatattgttattaaacccactcttatgacataaaattgaatgtaaacccagcccaggtctataaattcaaaatcataccaattaatttgtattcttggtgttctagtaagttccagatcctaccagatcacaggtatcattttaaatcaatccaattttgtattactataggcctatttatctttagaagtttaagggaacatggatgaagcgaagcattatagaaaactgaaggcaattttcaaactagtttatgtttttgaatctcgcctcctacatcccattctggctaattggataccaggggcctagacaaagactcaggcatggctacttttaggaagctttggtttcctaaggcaaagattcatgggatggagaatgtgaagagggaaggtggtgctggtgccggtgtactgtggactgactataccagaattttacatagtggaatcaggtttggtccatttaaattcatactagtaatagccagacaatctctgatttcttctacttgaatggtggctcaagaggcaaaacacaccaatagatagtagttgtattacttgtgaatattttctaagtggagacatatcctctgggaataggcattcttatacatttttcatgactgagattagatttttctctcatttggccaggcacagtggctcacgcctataatcccagcactttcggaggccgaggcagctggaccacccgagatcaggagtttgagaccagcctgactaaggcagtgaaaccctgtctctactaaaaatacaaaaattagccaggcatggtggcgcatgcctgtaatcccagctacttgggaggctgaggcaggagaatcacttgaaccagggaggtggagattgcagtgagccaagactgcaccattgcattccagcctgggtgacaagagcaaaactccatctcaaaaaaaaaaaaaaaaaaaaaaaaaaaaaaaaaaagacttttctctcattcaacactttaccagcatctactgacagaaaatggacaattgaatttcctccaatatatatacctctgatatgtctgctttgtaaaagagtagtgtaattgcttacaacattgaaaaggttgttattggggtcctggggtagccaggatatcggcatgatttgtcaccatattcagaataaaactgtactgcaatagtgagttaattccatatcttggccaacagagaatttttggccagtggctactaaggcacacggaagtccagtctaaaagggacaggggaggactctttgtagatagttcttatgattaaaaaataacttcctatgtgttgtagtgatgattaagctgacagaatgctaaagacacccttaatgattacttgtagcaaagtacttccccacatttagctggatttgtctttggtttgaagaggctaatacgtgaaagatttgttcacagttggatgtccccttttctgaaccatgaagtaatattgtgaatggagttgaatgctgaggttagggtgccggaaagattcagggtccttcggtaccctcacatggcttggctttggtagaacaagaaactaagctctgatttggctttaaatgagagtgctaaatttcctttttctaataaagaacctagctaaacatttatatatacttttgaacactgaactttcttgttgcagagttaacagctgttgggggtagctgacagctggatcctggtgctgttggtaccatggtacctgaagtgcacaggctggtagccacacctgacattaacaagtgagtggtaacctctctgccgctggcttacagctactgtttccatagaaatggctgtcgggatcagtggaaacgaggtaagtgaaagttttcgctgatccttgtttccatcaagctgacgtctgtttccctggcaacagcagtggacagcagccaggcgctagcaacagattcagtagagctctcacttgtcagctgtggctatcatctgttcctgaccaagttctttttttttttttaataatgtacagaaagacctctgaggacccaggaggcacctctggccacatgtgccctcctggatgctcgttttgcagatggagagctgtgtgctgagttgacttctctgtccgcagttccccctccacctgtgctctgggttgttgatgtgcaggttagaagagggaggttgttgagggtattagtgttgcaggggaggctgttgaatctgttgatcccaaatcctaggggaagagaattcattacagtgctttcatgcacagacccagctctttataaagctgttgctaccttaatagttgaaattaaagccataattttcctgtggtccctattcaattggaggcattaacaattgccattacttttacaatgaaaaggatatttaggagtttaataatttggcttgtgagaaacaaattgatgattgtctctaagatgctactgtcaacattatgctttttttctcttttgtgtaatattcttttacaggatggtaaaattgcttttacagagatcaaatattggtattgcagggcagcttggtatacaaagaccagtagatctatagtgtagggaactcttccttgttaaagttcaacagctccttttctggatttcattttaatgtttcaacagatggatgcacccaagccctagccctaagtattctccacccatatgagacagcattgatggtgccacagagcaaaggagagccactgttcctgccctggtgtgtgagatgagaggcatggaatgaggtgttggttttaagcccttactgataccatttattaaagagattttctctggaaaaaacaaaacagctttgatattcagagctgtatttttgagactcaaatgaacataaagatccacggtcttatgagaacttagatcggctgctagaagagcattggagaaccatggagttttgtctttggagggctttccggatgacattgttccacagctctctggaaatagggcaactgtgcttggcctgcaggcagttgaatttgatataacagacgaataagaagcagaaaatcctgctggatccttttttctccctctctcttaacttcctaagaatgacttattcatttaatgaattttttttcagttcctacacagtggtagatgtatgccaagtgccctgctaggcactggggttacagtggtggaatgtaggcactgggtaggcaccaggattacagtggtgggatgtaggcaccagggttacggtggtgggatgtaggcaccgtgtaggcactgcagtgacagtgtggaatgaaatggtttctttcttcgtgaagcttatatctaatgatggaggccaaaatgacaattacaaactcgtataaatgctttgaaagaaaggttcatgtgctgtgagagggtttaacaggcacaactgctgtcagtttattgggtaggagcatcctggaagtgaagaatgagtagtccacatatccaggcaaggtgggacaagaagctagggcaagggtattctagtcaagggaaaacccacagaaaggaggtacagtaggaaggagcagaggatgctggaggaactgaacgaagctagggtgacaggaactgggagagctggagatgaagtcagatgaaaggaaagagactggccggcagaatccaggtcacgtaggacctttagactatgtcacaggttttggtcattagctgaagggtaagagaatgcatggatgaattttaagcagggagtgatattcaaatttacattttctaaaaattatgctgtattctcatatcctcaacttaccttaaaatgcttcaaaaagataagatgattaatagatggatagggggatgcagagataggtgataaagaaaatgtagcagctgggtgctgtggcttgcacctgtaatccgagcaattcagaagggtgaggtggaagggttgcttgaggccgggagtttgaaaccagcctgggcgacatagcgaggctttgtctctggtacaaaaaaaaaaaaaaaaaaaaaaaaaaaaacagaagtctttttagctgggcaatgtggtgtgtgcctatagtcccagctactcaggaggctgagacaggaggatcgcttgagcctaggagtttgaggttgcagtgagctatgatcatgcttctgcactccagcctggggagcagagtgagaccctgtcttaaaaaaaaaaaagaagaagaagaaaaggtagcaggtgttaattatggaatctaggtgaggtaggcatatgggtgttcattgtataattgtttctacttttatggatgtttgaaattcttcctaataaaatgttgggaaaatctgcatatgaaaatcactgtggctgcagtaatatgaatagattggatggatacacaaatggatgtagagagaccaacttaaggctcatataatctgcttccagccacaacatactagtgctaccagactggacctttcaccataaacaactacaaaagactgggcaaaaaataggaagcaactattttcagaaaatggaaataggatatacaggattgcaatccctacgagaagggaaacacatgaggtaaactccgcaattgtcctggctttctgcctggagacagttttagaattatggcagagagggagagcccagcagagaacgatggtctatttgctgaggggtcaaagaacagtgttcagggctgctaagatagctgggattttcagggcagagtatgggtgagaagtatgcagagaaggggctccagtactcagagtggaggttctttgaaatctgaccatatactaagctgcttctgtgccaggtgatacttattgaagccaggcagagaacagctagtagaatgctgtaagtggttggaaatctctccatgctgggaggtatatggttctgctcagctgtagtggaaggacctaattgaatacattgggtactgagacttcagaaacgccaggctttagggttggagctactttagcccttgagtaagcctactgtagacctgacttaaaaagcatagaaacaagcttcaaaaggatcagggaaatggccaataaattaaacacctgtcaaaaagacaaaaatcaacactcgttaaaggaagagaccaaaactcagatgttcccagaatgtttttcctcatgacccaaaactataagacatgaaaagaagcaggaaaatattcacgatcaaggagggaaaagtcgatagaaacaaaagatgacagatgttgcaattaataatcaaagactttgaagtcactactatgagcctgtttaaggaactgaaggaaaagatggacataataaaagaataggtaaatctcagtaggtaaatagaaacagtacaatatctgaaaaaagtagactggacattgcagaaaaagttggtgagggcttagtgatctctaaaacaacaataagcaatctggtgtatatgaaattggagtcacaggagaataaagagattgaggaagaaaaattttaagataaataaagctgaacatgttgcaagtattgaaaactaagttaacagatccaaaaggcccaacaaacctcaagcaggggaaacacaaagggaaccactgctaagcacatcaaatttagatggctgaaagtaaaagatccagagaattttaacagaaagcaaatgggaaagggcacattacatactaggagaaaataataagaatatgcatttacttgtttgcagatatagtgcaagttgtagggcaatgggtgacatcttcaaagaggtaaaaggaaaaacgattctgtatgaagcaagaatacccttcacaaaagaaggaagtagaaaaactttcaggtaaacaaaatctaagaattggtcaccaacaaatttgcactctaagaaatgttaaaggaggttcttcaggctagaagaaaataataccagatagaaacgttaaatgtccgctttaaaaacgaggagcatggccgggcacggtggcttacacctctaatcccagcactttgggaggctgaggcaggcagatcacctgaggtggggagtttgagactagcctgaccaacatggagaaaccccgtctctactaaaaatacaaaaaattagctgagagtggtggcgcatgcctgtggtcccagctactctggaggctgaggcaggagaatcgcttgaacctgggaggtggaggtcgtggtgagctgaggtcacgccactgcactccagcctgggcaacaagagtgaaactctgtcaaaaaaaaaaaaaaaaaaaaaaagcatcaaaatggcaaacaaagataaaagattttttctcatttctaaattttctaaaagataatttaaagtaagcacaaggtattatgggaactgtaacaggtcaaagtaaattataggataaccatacacagaagatagaaggaagttaaatggagcttcactgtgataaagttactacattttgaaataatatgaattcatggtagactgagaacttaaggatgcatatgataatctccagagtaatgacttaaaaggggtactaaaaagctaaaagaagagataaaatggaatattaaatagtactaaattatccaaaataagtcagaaaaggaagaaaaaggaacaaagaacatatagtaccaacaacgagatggtagacaaacccagtaatatcaataattgcattggatgaaaatgtacacaacattttagttaaaagatagaaattgtcagactaaataaaaatttaagatgctataaagacatggattaaaaataaaaaatggatgaactgtactaatccacacaagttggactttagtataaggaacatttccagaaatagggacatttcagaaatagacattttattctcataaaaaggtcaattcactgagaagacacaatgatcctaaatgtgttggcacctaaatacagcttgagagtacatgaagcaaaagttgttaaaattaagtggagaaattgataaatctagaaacatagatgaaaatttgtatcattccttctcaataattactaggttaaaaacagcaaatatagataatatctagattatatttagattggttaataaattcagccaacttgacctaattgatatttataaaatactgtgttcaataattgcggaatacacattcttttcagagcacgtggaacattcaccgacatagaccatatcttggccatgaaagtctcattacctctcgattgaaattttacaaagtatctttgttctaatggcagtagatttaaaacagaagccaataacaggctgtttataaaccttcccaaatgtttggaaattaaataacctataactcaaaaaataataaaaattagaaaatactttgaaactgataaaatccaactgggaaattgtatgatccgttgaatgcagtgcttggagggacatttatagctatatcagtaaggaagaaaggtttaaactcagtagttctacatttccatctactaatctagaaaaagaagaccaaataagtccaaggtaagtagaaaaaagaataacagaagtaaataaaatagaaaacacaaattataaagttatttagaaagcgtaataaaaattgataaatctctaacaaaactaatcaaaaaaggaaaaagagcaaattaccagttttataaatgaaagaggagataccacagatattacagacattaaaataataagagaataaacttggtaacttaggagaaacaggcaaattccttgaaatacacagcctaccaagaaataaattgggagagtcctatatttgcctttttaaatggaattcagaatcgcaaacagaatcgcaaacagaatcttctctcaatcttctctcaaagaaaattagaagcctagatgaggtcaaaagtgaattatgtcagccgatttagaaaaaaattataccatccctagaaattctttcaggtagtaaagttggagggagcatttcccaactcatgaggccaaaatctcaataccaaaactttacaaagacataataagcacagtgtccttcattaatttggacacaaaaattctcaaatattagcaaatagaatatagcaggatgaaaggaataatatctcatggccaagtgggatttatgccagaaataagttgattcaccattggaaaatcaaataatttaccatattaatagaatgaaagaggaaatcatacgatcacctcagtaaatgcagacattactaacaatattctataatgatttctaataactctcagcaaactaagaatatgcaaaaacttcctcagcctgaaaaaaaaactatagctgacaacatacttattggtgaaagactcaatcttttcttcttaagattaggaacaaagtaaccatttttctatcttcttttattcaatgttttattgaaagtctgaaggtaagacaaagagataaaaggcagaaagattggaaagaaagaaaaaactatttctatttacagacataattgtctacatagaaagtcccaataattgaaccaaaaacctgctagaattaataaatgagtatagcagggtgacaggatacaaagtcagtatacaaaattccattttattcctgtatacaagctgcaggtgttgaaaatgaaattttaaaaaattaccatcaaaaattatttacaatagcattcctaataggaatgaatataagaaaagatatggaagacctctacactgaaaactacaaaacactgattagtaaaattacaatgatctaaataaatgaagatataccatgcccatggattgaaagactcaatattgttaagatgtccatttttctctatgcattgaatgttgtcccatttataaatctcaatagcctttcttttagaaactgacaagcttattctaaaactaatatataattgcaaatgacctctaatgaaaacaatcataaaaaataaagaaggagggcttatactgctgatttcaaaatttactgtaaagctgtaataaatacaatgtttgacataaagatagatgactagaataactgaatggaataacaaattcagaaattcctttatatgttcaattgctttttgataaaggtgctagataattcagtggagaaaggatactctttttagttaaaaaaaaaaaaataagctggagaaactgggtatctgcaaaaagtgtgatgctcaggtcataccagacacaaacattaaacttgaaatcgatcatagatctaattaaaaagctaaacatataaatattttctaaatagatttctgctcttcaaagactagaaatttaaagggaaaccacactgggagaaaatacaacacttacatctgtgtatctagaatatgtgaagaactcttaacaactagataatagatgagcaactcaaaaattggcaaaacatactttacacaagaatgtatatgagtagccagtaagtacacattaaagatgttctatgtcataaaccatcagggaagtacaagttaagaaactgctacatagatagtacaatagctaaaatcaaaaagactatttccaagtgtcaccaagagtacagagcaactgatatgctcatacattgtttatagaaacataaaatgatacaactactttagcaaagtttgtcagtatctcataaagttaaacatatactcaccatatggccaagcaattccatttctagtatttgcccaagagaaatgaaaatctatgtctacaaaatgactagtacatgagcactcatagagccttattcatagtagcccctgtggggctgttggaagcttcagtctccacagactcggccttgggtggaggtccgcccagctggggtgaggcagtgatctggctgcgagctgtgccaccctggcctgtggggtctctgctggctgagggattactggtttctctgttgtagtgaggggagcacaaaggcaggggtcagaagtgctggcccgtgtgcttgctctgtacttacagaggcatgacttctttggtcagtatacttcacgtttccaaatcaaggctttttcttcctaaaattggagcgccccatctctgacttttctcacagagccatcctaataaccaaggagagaaatggatgggaagggcctggataaacgggaagacctttccaagtatgtgggagctccacactggcctggttgtgtcctcctcctcggaggtcatttctgtgagctggaaaagtcatctcatttgcagtctggatgtttatctgcacttctctccagggcctcacatccttccaagacctggagcggcacttggcgcattagcctgatttctctaagtctgactgtcatgagtttggttttgggttcagggataaaacattaatccacagtgaacccatcattccttcgaatttctgctttaaaataaatcttggtttaagttgcctgctggcagttttgggcctctgagtcttggagacccttgctgtgtctgaaggattttaagtcagtgggtgagagtacaccacctgctgagaggtgtactgtccccagaggcccacctgtccttaaatcatggactattacttacaaacaggcccacagacacatgccaagaattccagggcccagtgtagattccagcagctgcactctgtccccctttggctatcagtcaaggatgtttcagcgtcaaacctgtacctatcagtatgccctaggagcacagcagagggttggcaagtcagagggcctcacccaaggaagctgggctccagttgggcattgaaggatggacaggattcgttaggatggtaaagaaaggaagcaagttgtcaggagagtgggacctggtgcctcctgcctgtcggaaccagtgagtgcaatggtgaggctgccagggtgctccgtgctggctggtgagcagtgggcagagcagatgtgcagttgggaatacccactgagagaggcagggtttttttttttttctttaagctgcgggagctgtcagagtgtttgaaataaggtgatggttgacagctgtgcctggaaggtaaagctgccacctcccagagtgcagtggagttaggagagcctgggggctgggggctgggggctgcagggatggggtctgcatggaggtgcagaggtggagatggaagtgaaggtatagatgtgggagtttgttgtggctcgtgcctctcagataagaagaggtctctggattttgattgtcaagtctggggatgtggattgtatgagagaatttttcttttttcttttctttttaaaaatattttttatagagacaggtcttgctctgtcacccaggcagcagtgcaatggtgcgattgtagctcattgcagcctcaaatttctgggctcaagcaatcctcccacttcaccctcccaagtagctgggactacaggcatatgccaccatgcccagctaattttaaaactattttttgtagaaacaggatctctctatgttgcctggctggtctcaggttctggcctcaagctatcctcctgccttggcttctcaaagccctggaattacaggtatgagccactgcacccggctagatttttttttaattgcttataatcctgtgctttattcagtttattttaatcatctccactactttgatgaggtaagtgttctttgcctcagtttacagatgaggaaatcaagactcagggaggtttatcaattttctcaaaatttacacagctagtaagtagttaaactaggaattaaatctagatctgtctgtctccagagcccaagctgcttttctcgtcagttggaagctggttctaagtctggtgagaggaaacccgctgtgggaccctgtcttcccagcctgggtctgtgctcgtacatcctcagctgctgtattctcaaagctctatgctttgtcgtttttgtttttgttttctcttcctgaaattaattacccaatgctgagtggaacaatgggatacagaggcttcagagaaattggtttagttttcctcttgaatctgcttttggacaagtctcatttgagctcaggtggtccttttgggtcctgttgctggagggtggatctctcagtctctgagcccagccctggggtgtggtgctctgccccttgttctccgtcagccaagtctgggtgctctgggaaggtacttcccacccaccgtgcctttcagtgggcactccccctgcggggggatcttctctatccctctcctctctagatgcagctcacagggtggtttccgtggcctgcgagtgggatttgggctgaatttcctacagtgactgctttagggatatgccagtagggggttcaatttcagccccttccttgggtccacagtgctcctccacagtgggaacccctagcagctctgaacagcagatccagcctcgagcttattctggcagtgtaaccaggcccttcacacagcaaactgtagtgacatgtcagtagcacatgccctgcggttgctggtgccttcaaaagtgttcattttaggtggttctgccaccctcccaagccagacttcatgtgcacatcttccttattttttcttgaaaaactggaatctgacaagtctagcagagtgtgtttatgaagtgacttcttaagtagcagtatttgaaacctgtcatgaagatatgtgatgatattggtttggctcatgtgattaagtgatctgtttcgttcagagagagtgatggcagaaaagagagcccatggttttgaagaatacctctttttttttttttgggggggagatggagtcttgctcttggagtacaatggcgcgatctcagctcactgcaacttccgcctcctgggttcaagagattctcctgcctcagcctcccaagtagttgggattacaggtgcacaccactacgcctggctaatttttgtatttttagtagaaatggggtttccctatgttggccaggctggtgttgagctcctgacctcaggtgatctgcccgtctcggcctcccaattgaagaatacctcttaaaacatgtttaagttttaaaaagattgaaacaaagtctgtaacttttagcatgcaaccttcatggattctcatcattgggaaaaattttctactggaagcattggcatgtcttttgtagccatggaaactaacccttcaaagagagagaagctcttctatcctcaaacaaggagatacagtgaaaggaaggcatatttcatactcagatgcctgaaatactttatttctgtgtgagtgtgtgtgtgtgtatatatgtaatatatatattgcagatatatattacatatataatatatatattacatatataatatatatattacatatataatatatattacatataatatatatattatatctataatatatatattacatatataatatatattatatattatatctataatatatattacatatataatatataatatatattatatatattacatataatatatattatatatattacatatattatatataatatatattatatatattatatatatattttaaggcttatacaagactcctgcttgtttttgtttatcaatggcacgatgggtgtagttttaggtgattgaagttacatatgcactgtggccaaatacacccagtacaaagcccaaagttgcatgtctttgatcctcattagtgtaaagtccatgtttgtgaaagcaattatttaggtgatttttatcgagcaactactaatggccggggtttgtgataaggaaccagtatacaaagataagacagacacagcccctccttaacagagtttacagtctggtaagttaaagaaaatagtgaaaaaccaattgcaggactgtgaagtaaattctgcaaaagcggagttctaatctggaggactctaaggtagagaaaagtctttatgtcttgagccagccgagtgggatagtatctggaagagcaggaggggttatgcaggcaacagcatgcacagtggcctggtgttgaaagagctccatgccttggaggaactgagtgaactttaggatgtctagagtacacagttcaagggggaagaggtcagaaaggaggcaggagagatctgacatgaccagataggtggtgcattccttcactccatccctaccgcactctcctgctcagggtaagtgccacatgtaaacagttaggtttggtctgtgcagggtggcccagctgctaattcctgtgttctgttcatggtggataactcaacctagtcattaaaagctaggaaacaccgactctgaaaatgattcatcttcccaaaagatgaaaactgttttaaacatcatcaccgtcttttatgtcaatgaaagcatcaacaaccctggctgggcacagtggctcacgcctgttttcccagcactatgggaggctgaggcgggtggatcccttgaggccagaagtttgagactgccctggccagcatagagaaaccctgtctactaaaaatattaaaaaattagctggacatggtggcgcacacctgtaattccagctgcttgggaggctgaggcacaagaattgcttgaacccaggaggtggagggcatgccactgcactccagcctgggcagccgagcccagaccctgtctcaaaactaaaagtaaaaatagaaatgtgattgtcaaatgtttttcttcaacatattttactgtgtaaacaagggacccccattttctcgtcctttttgcccaccagcggttcccatgcatttcttggcagctgtgtttcatgactgctgctggagaatgctgtcccaggccagctgtcttccccccacagacattacctgcaaaggagcaggtcttatttatggggtgctgtattcctaatccctccccaccccactctgcctattggtctcatgcagagagaacatcctttggctatcaccagcttttcatggttgagggaaaaatggaacaaatacaatgcttttgatgaactatgagctgagccagtgccaatgattaaaaattttttaaattgtgaaacatcacacattgctgttattttttttttttttttttacaaaattcctagtttccttgaacagaaactgaacctttatgctttccaagaagttatatttaaacaaaaaagttctttgaatcaaactacatttgcattctgtttcatttccttcatgtctatgtagaggaaataatttaggtctaaagaaggctggactcccctgataaaaatcagtgggttacttcttcaacttcccccttctctttgcctttataagtgttgcctttgtttttttctgaatttctgagccttctgttttactaaaaatctgagtccctagtgattttcgtggcagttttcaatggaggttatgttgttttttgctttgtttcgagggttttttgttttgttttgttttttgcatgtgtatgtaaatatcaaagtgttttgtttgtttaaattttatgtgggtctaattaaaacagatagcattgcaacacaagaaaaaaaaatcctgtatctaaatcaagatgacttccagtggcccatttattttatgggacgtttaagaaataaaagttcccacagcaaactgcgtgtcctcttgcatctgcggcagtcccattccacctgcacctctgtttgtgtgtgatggctggctgcagcctgggcgtgctgtctccagtagtgttggctgagccaggggtccaggagatcaggatgtcagggcctgtaaatcctggggcatgtgagtgtctggtggcctctctgcagaacatgaggcgtgtgcccagcccgtgggggctccactggggctccttagatggaggctggctgggtctggggcaaggggttctctccctggagtggtgcttactgagtgggagtgagggacagcaggtggagagatgagcggaaagggggctgtcacctttctctgtcctgagttggggctcttggggaaaatcagagtgcagtagtgagcagagctgggctttatgccctgtcctccctccctggtcctgattcatgacctccccgtgagccacagccccacggaagggacgtaggatttggagcctggttagtaacgctgttgttctgttgactgggcatatgatgtgggccagcaacaatgcctcgttgagcctccgtgttggcctttgtgaaatggatgtgaaaatcctcctcctgcctcttccactgaggttgtgagcagcccagggggcagtgaatgtaaagacatttggaggactctaggaacaatctaaataaatgaggggcttttttctgttattgttagagaaggggacatggcagagactcaggctgttttgccaaaacccaggtcgctttccccagctgtgcaggctcgtattctgctgaagctgctgttggttattcctgggaccctgggcgatgcagtcacaggtgaaggaccctgggcgatgcagtcacagtggggtgggctcaggctgtgcttgtttcagagacgattttggcttgttctgctgtgtttgtctattccatctaaaggtcttttgggggctggatgagtatggggcgcataccattgttctgtcgtcagagcgccctgcagccatttctcgtgaactcactcagcacttatgcttcttgggtgtcaatgccaccaaactacttggctgccaggtccaagagcgtgccaggctgttgcccagggaaagaaatgggcaacaaaaaatggactaagtcacagcagtcaggtccccgtggaggaggtgctggggaggctggagtcgcagcagcagctgaaaggtctttagaacgtgctgtgatctggtgtcgctgccgagtcattagtccatctctactgaggatccctgtctggggaagttgctgcatcccagggcaactgtgctgaaatcagttgtcttatttcaaaacttgtgcctgtgccctgagaccctcagcaggcatccttcttccttcatatggcagcccttcagatactggggaccagcctctcttctccatccctcctcctgccccgcccagcccgtccttcttccctgaacaggtggacaagaaatgttcatgtggcagatggggtgtcacggggccctgacaaggaaggtccacatgaggggagatgattacactggtgtgctagacccaggggactggtgtggaaagggcagaggtgacagtgaccgtagcatggtggtggttgggggtcagtgacaggcgtcataggtgtttttccaaatagtcgtgtaagaaagttggggcttcatgagaagtgtgtttttgaccacattggtattgatgttaaatccaacccatcacccagtgcttactgaatgtctctggtcttcctcagcaccattttcttcttattttcattttctgttcacgcataacacctgtgaaagctgataggagtcctatcaaatttctgtctgttcctccttgcctacagagaagcaatccaggttccttagttttgtatttaagcccctttctggactgacaggaagcctgttttcgttagtttttttgtttgtttgattgtttttgagacaaggtctctgtctgtcacccaggctgcagtgcagtggtacagtcacagctcactgcaacctcaacctcccaggctcgggtgatcctcctgcctcagcctcctgagtagctgagaccacaggtgcatgccattgcacttggctaacttaaaaaaaattattttgtagagatggggtctcactctgttgcccatgctggtctcgaactcctggcctcaagcaatcctcccaccatcacctcccaaaatgttggtatttcaggcgtgagcctctgtgtctggccttgtagcctggttttgatcctcatcctcctggtgtctaccttctccttcctctgctcctgcttttccttccaggcatcgtgttgaggtgcttagggtagattcagcagctgcatggccttgtgtgcccacgtgctgtgagcctcagtgtctatacaagagggtgatagcagcccctgcctccccatagtcactcaccagcggggatggggtaaggtgttgctctgggctctggttaggttgcaaggctgagggggccacccagggtaggggacacatgtattcatgttttggtgctcaatgagtagagttttctggtgaattagaggcaggcagaatgcatttggatggggtaagccagagaatgtgtcaccaaaagcatgagacttgagcttggtcttgaaaggtgcactggattcaaagatgggagaaggctgcccaggtggatggaattctgtagacaaaagctcacagggttgcggaattgagaagagtgtggccagagtataaggtgtgcatttataggatgggtgaataaggctggaatagcacttgggagaaggctggaaggccttgagtggcaggcagaagcatctgaccttcatccttgagggaggcaacaaggagctgtgagacattctgagtaggatgccaccagggggaagtctgggtctgcagcgacctggagcagagagggaagcaagctctgatgaaatgctctggccgcagctcctgtggctgcccagggaatgggtgtgtgcagacaggcctgcataagacacttcacagctgtcctgttaggctgttagggagattccttactgagtaattgcttctcaaccaggagataaaagggaatatcttaatgacctagagacagaagatctaccacatgaggcctgaacacaataagggaaaatggcgagctggccgtggaggctgctccagatgatatgtctagttttgggcacactcatttcatgcttctgggcgatcccagcaattgtgggctttctgtcctatagggacattttctggcctcctgaaggagtaggagtagggcttgttttgttggatacaattttttgtacatagccttcctgcatgcctatatgaagtggcgccaaggggaaatagagacatgggaagaaatacatgagaaatggacagacaacattgtccgttcctgcctgcaaggagcttacagtctagctggtaagctgaaatgaatatgtaatagcatgaatttgaatttggttagtagtggagttatatcttctaagcattcaaatttttttctatttggaaataatttcaaatatatagaacaaccccaagaatagaaatagcacagtgaataatccatgtaccccttaccccagttcacctaatattaaattttacctcatttactttttcatttgttatctatccataagacatgtggactgatttttaaaaatattttataatttattactgtccttagttatttcagtgctcaaatttcctaagatttggctagtaggagctacttctctagctcctgtatccttatgacatatctccataatgtgttttggtttgtttttgttttttgagcacttccttattttcttcatcttgtacctaccctacccttgccctggaatcacccagttctccaaagtcccctggttccttttaatggggaatgttattagagaccaagatgtgggtaccaggtgtgcttgtacctgccagagcatctttgcttctaagtcctttcaacaggcagacctaggaaatatatgcatttccgtacacatattcatacacatacttacattgatacatacacatactcacatatcagcctcttttaaaaatcagacattggaaatcagactttaaaataaacatcttttagaaatcatcagttcacacctataccttcaattccagcctgtccccagagggttcttctctgttccgtgtttctgtgtccctccttccacagcgagaactctggctcccagcagcattagcacatgtactcactggctaaatcctgtaatatgtctaagatagtttcagaatggtctcatccacatcactgcaaaaaacaaagctactgaaaagagttcagcatttgtttgtagttcatccctcactccaatcctacccaagactgagagtatgtcgtcaaatattcatgagctatttgaattagttttgtctttctccttcagtctggttatggtattcatttgaattacagatttgtttgtttcaaatcactttcagtttaggggtattttcccttcatctcatccttactgacttaatttttaaaaatttaaggtgaagaacattaacatggttcccaaagtcaaaactatagaaaaaggtatacttaagagtgtcactccaaccttgattcctttggcctaattcattcccatcccttgttttctgctctttcttttagatacacctgagagaaatatgctccttttatttcccagtttttcgtgtgtaaagggtagcacactttattgctttttttttttttttcatccaggcacttcttatttatcttttgatcagacacaccataaccaaaattctggtttggaacaagaagactcctagcatataacagttgttggatttttagtcacttgcaaaagtctgttggtttctaccaatagctttattaaataagctttgtaaaacaatctcttagtaataggattcttagaatatgatgaattcttatgcaaagtggagtaacttttttcccatcattgcaaagtttgatagaaggtgcctcggacttgaggtgtgattttcaggatcagagggtcagttgtgatgggaatgggttattctcaactgagcagatagtgtacaggattggcagtgggtttgccagctcattgcgatcactctgagccttgggacccatgtgtccttctatgtgtctcccaatcctaacgggtttgtggcagcttagagcccattcacagctagtgctaatttttctccctttgataatttgagaaagctcttccatttgccttttgaatgtctctcttatgtctggattcaacaactattatacatttgaacttcacgttgataccactctttgtgttttcaaagccttactgaatgtcttgcttaattcctgtgaaacagcggaacaggtattgttgtgtctgtttggaagtgaggaaactgaagctcagaacacagcagtgacagagctaggactagaagccaggtcttcagacgaagagcccagagtggtgtaggagggccaaggatttatctgggtttatcacagggactctacctccctgcccccttcctccatcctgccctgtggccaacagatttctactgtataaacctcacctctgtccacatcaataaataataccttcctgctaaatattcagccattcagaactgtctaaaatcagttcagagggtctatatcagcagctttgttatatgagcttttgtgatagtgaccatcattgtgagtgggccataaaccaggacttggcagggttttttactcctaggaattttagtcagagtagagttttacttatgcctgcttacctgtgtcccagcagtggaaaatgtacaacagtgatgcagcttgttagaaatgggatttttatatttgtaatgttaaaaaggcataaaatattacaaaagaaaattagnnnnnnnnnnnnnnnnnnnnnnnnnnnnnnnnnnnnnnnnnnnnnnnnnnnnnnnnnnnnnnnnnnnnnnnnnnnnnnnnnnnnnnnnnnnnnnnnnnnnnnnnnnnnnnnnnnnnnnnnnnnnnnnnnnnnnnnnnnnnnnngtagaagttagttcatcaatggacgttcattttataatgtatgtaattatacattataaaatgtatataattatataatttaaaaataaaatataattatataattataatacattataaaatgtatataatgtatgtaattatgcattataaaatgaatgtccttaagcttctcagggtaactcttttactatcttcataatttttttcccaagaacccatatatgatatggacccaaagtaagaataccttgtttgtatgtaaccatctgaatttagtattctaagttcggaatcaaaacatgcaaacagatttgtactaggatacttttctggtgaataatagaactgaaggtccacttttctttgagatgtatttaagaaaacagattatataattcattttcctgcagatacatgacatgccaagccctcttactgttgctcagggatgtgattctggattgagttgtgattttttcagagttcagagaatcatttggtgaatttacctagagctgagttatgtatttcccatgtgtcaggaaaccccggaggcctagaaaccccaaaccattctcagggtgtggtacatgtgaatggcgagacactggagtccttacttctttgagacagcaggtgttctttgggctgggaggtcagagcacgtgtctgggctcagatcggctcctgctcactctctagatccacaaagcctggcctccttccttattcacagggggtggagtggagactgacagccctaacaggaccaaggataggttccagggagtctggaaagtggggtgatttagaagctatgagagggatcctttctttttcttttctttttttttttcctttctttctttcttttttatttttatttttattttttttgagatggagtcttgctccgttgcccaggctggagtgcaatggtgcaatctcagcccgccgcaacctctgtctgagtgggattctttctaattgtgggcagagggtggcacttggtgaggattccagtttcttatctgaagtattagtgtcactgggtgtgcaagcatctgttcagcccctcgacagcctagagttaagagacgggtgtgaatatggggttagttttgttgttgttgttattattattattattattttggagacagcgtcttgctctgttgcccaggctggaatgcagtggcatgaacttggctcactgcaacctctgcctcccaggttcaagcaattctcttgcctcagcctcctgagtaactgggactgcaccaccatgcccagctaattctttttattttagtagagatggggtttcaccatgttgaccaggctggtctcaaactcctgacctcatgatccacccaccttggcttcccaaagtgctgggattacaggcgtgagccaccgtgcctggctggggttagctttatgaaagcaggtcacttccccattcgtgggttgggttgggttgagttgggttgggttggcttatcgaggtaggaccctgaaagagacatgctggctttgactcggaacaaaggcaagaaggcagacagaagtaacctgtgtcagaatctcaaggtctgtgtgcagaaactgcattgctgtaacctcacctgcttccttggcagctttttactaagtctctaactcacatatcttggctcctataacaactcacggttggagatgcagatggttcctcatatataaaaattgggtaatcgtccacctgactctcaggcttgcctgagtatgtggggttttgtatatatgcatagtcagaggcttgcacacatggtggaaagtagcataaacaccccacaattgggaacatttacctgtctgccagatcttttccagggcaggtgttcctataaatgggcagaaaatcatatgcctcttcccctcctgcagggaagacttttggggaagaccatgacaagtagcaggggttaagaaaaacagtaatgcttcatcagtgctcgagttcccatctgggaagggagaactgggttgtggagggggtggggactgccctgactccatgcactgctctggcccgaacctgcaggtgatgggtagaggagcctagtgtgggcaccagcaaggactgctgcctgctcagagctcttggtttggacaaaaggggtagcacacaatattaatgcaaagtttgtccaaaagcattgaagaagttctaaacttggtactctttgaccacagcttggcccatttgggtccctcctctttgaggaggctctggggaaagtggggcgtctctgagttcaggccccttgttggggggtgtcagaggcctgccatgacagcacatggtgttttgggcctaggccccttgagatcgctgtcatcgaggggagttcattttctaagaaatgatgcatgtgtgttggtgtgggctctgcgactctgacccccatagtcttgctttggaagacactgtcttctgtcctgtccaagtgtgtggctccattgctgtgctcatgtgactatactcagtgctgtgtgtcctgcccacaagactgttgtgcagtagggcagtggctcaggatgcaggtccccaaggatgtcctgatatgtgcttgtcctctttgcctccttcagagaattctcaaaggaaagagagaaggcaaaagcacggggagatttccagaagctccgggagaagcagcagctggaggaggatctaaagggctacttggattggatcacccaagctgaggacatcgatccggagaatgaggaagaaggaggagaggaaggcaaacgaaatagtatgtagcgcctttcctgcccctggctagacagacccagtgtgcggttcagacgcctagcagtaggccttcctcgactctgacccaggctgtgagtgggacagcctcctcccagccatctggtcccttctgcctgcacacatcacggagagaacaggtgcattggtgctgactctggatttctgcctgaggtttggggtttagagttgtatttggtaaggtggctttatagccaaggaaggtcaaacggacccactgttggcctgggaaattcagtaagcgcatttctgtgcgggcacaggggtgatgagacacatattcttgtaccacaggagaagaagctgtggtttccctcacctcagagtgaacagtgttattggacaagaatttgaagtgcagggttcctcttgactcttactcttaggccacctgacatggctcctacatgtgctattcatatgaagccatatgcttagcccatcaggggctgggaggaaaccggctcaccattctaggcaggtgttaaggggcacgtgagtcagtgacagctgctttgctgtcacccatcgacaccccacactgtgacactaagcaccctagagcaccttctgcaggaggcaaggcctgagaactcagtccatcactgacattaattgccattgtcaaccacggtgtctctttcactgcatacttttcccacagatgcgctcttattctctctggggccctttgtgcctcgggtcagagtggaaactggaatccagcaatgcatttgactgagatgtctgtgacttgcttcaaatctagaagagttggataggaaggaccaagaacgtacttcaagtgcacatgtccattgagaggcctggggacccgaggccggccctacgttgtagaagatggccgagcaagtccctgcttgagcagagcgccttggatgttttgctctcagcaaggcctgttgctgggtacaggggaaacccagagctggagaggatgtggagtgctgcctcctagggagagacaggcctgtcacactaaatgcagccctggggagcagagctgcagggcacacatagagggcaggcaccgccgacgagggatcgaggacagggctggagggagcatttggcctgggccctgaaggatggatggattgcaggtgtgaccattcagtgtcagaagaagcaccctgacccaggggactagcgtgagggaggcgtggaggtggacaaaggccaggtttcagggaggaagcagtgggcccttcagctggagcacagagggtatgaaggtcggggtgagctgccataggaagggtgggtgaggtgcaattgtgcctcttctggaggttgtggagtgtgtaagtgggggctgagagacccctggtggagaggcttcttgactgagagggcccttacctttcttcaagcctgggctctgtgcctccatggggagggagtgtgttccgtgatctcagatgccctggctggtgcaaaccagtgtgctgactgggagtgggcagggtcaggcctctcttctctccctccctgcttcttgccaggctcaggaaggggccaggactttagcacctgaggatcagaagactgagggagggtttctagagctaactgtttgctgaatgcaagttcagagtttataaatagacattcatgtgagtctcagactcagcgatgtgcctatgaagtgatcagatgtaagagtgtctgcctgtcctctgcacagctctccccttggcagttgagccaacgtgaaccccatggctttcgtggagcttctgcacctgcagtatggcaacaggccatgtaggtgcagcttggagatgcctgcaccgctcttttccccttcacttgcaaactgtaactcagatgctgacctgccccatctcccctaaacccaacatgttatttgtaaacgagaggaggtatggcccctttttctcagcagagtgtctttctttgctagtttagctgtgtcccccagggagctgagtgaggccttcttacaggccagtggcctttcctctgtttatttctcctcctctagaagtagacaaggtttcgtgttctagtgttgctaacattagtcgtggtagagttgtttatagggcctatgatttgaggattaagggttttcattggatttaaggtgatatcttgagggttaaccattttatctcagcccagcatttcctatgacctatcactgtaaaaacctgatgatgacagaaatcaatgactctgcctttcagagaacttgccatgaggggaagatggagaaggagtggcttagtgtgagaagctgatcccattgttaaggcccagcactctgctgtgtgagcccaggagggcgcgatgattctggctggtgggagtgggcaggctggggcgatgtgaggaaggctccgtgggaggagcagccctgggcggcagaggttgggggtgggggctttttcaagctggggaaatggcacaaacaaggtgtgcgaagtgacaaatattcagggcccttaagtgcattgctcagtaatataatctaggaaagaaacaaaacctgtttaaaagccttgtagatcttcagaattcactctcactggggctcccaagcccataaagctgcaatgtgtcttgggaacatcagcagtattgtttctgctatgcaccgtgatgtgtgactcaaaatgattaactagcttaacgtttgatccagaatagcaaatatttctgtggtgcgcccttgttctttatggagctcgttttgccaggtgctggggtttcctgtggagtgaggctcacagtgcttcccgagtcatcagatttccagagccttgctgatgagggttttaaataaagacagaaatcttggctgtggaggccatgatgggatttagctgacttgagagcaccaagtctcctcctcctctgaggagagaacctctctgatcacagacctcagcagcccagaccctctggaggagacagcactgttgaggtttccctggggcctcctgtggctgccagccattttcttcctgtcacagccagaaaaccacacaaggagagggtttcagtgaggcccacatggtcctcctcaccaaataaacagtcctggattcaccacatgcacatgccaggtctggggctgtctctgtgcatctgattagcaggcagtagaaatgtgggtgttgccagtgttacggtgtctgcatcctccctgggggtgtgagatcaccccacgtgccttccactccaaccctgctcctctgttacctcttgagaggaggatggcgcagggcccgggctcctgactttgtccataatggctaaggatgctaattcaactgagagcccttttcagctgggtcctggatgtgagttgagcagtttcctcccagaccttgaggattgaagtgacagtgtgagaagaaatgcttcctgatagccgagcctcagcctagatgagcagaagtgggtgtaggaagtcattaataacagcagatgtctgtgagctcacaggaggcaaaggcttgggctggagggcatcttgatgccccttctccggatgtggctgcaatggagttttgtgacttggaatttggactttagtattaggcaaattactcaacctctctggaccccactttccttgtctgcaagaaggggataaagatatatctccccatggggctgttgtgacaattgaacgttctgtgactgctaggagtagtcatagttgtagtatgtgctgctgctgttttcatcagacaccagtaaaagttgacctcaacagaattttaggggtataaatttagggggtacaaataccgttctgtgacatggacatattacatagcggtgaagtctgggcttttagtgtaaccatcacccgaaaagtgtacattatacccagtaagtaatttctcatccctcatgcctcttccaccctcccacccttctgtgtctccaatgcctattattccatccacaccctatgtccatgtgtacacattatttagcttctgcttatcagtgagaatatgcagtatttgactttcctaaacataatatttttgaaggttctcctagaccgctaaccagcctcagggtggggcctccctcttaggaccattgccctgtgcttttctgttcagaaactataaagttctgaagtattgatggaaaacaaatctgttaactaggtcactttcgagatagggcagcacagctttcaggctcttgaagtccatttctagtttggcggtgcttgctgtcagggaacagatgtcaaatcaagtacttggagatgcgctcacattatcttttctctctgatctgctaaatgtcactgcatgcgtctgcgatgcccaacactggctgtacgttataatcacctggggagcttggatgcttcttgatgccatactccaccctctaagactcttgattaatcttggggtgggagccaggggtggctctttttcattaaggttccctggggattctaatgtgaagctagggttcagaactcctgagtccaggatgctatcagtggctgaatatcacactgttccaggcattcacttgaaagaagaggagaggcaatcaggcctctaactgagctgtctggtgactggtgacaggtagctccagctttgtgcattcatagaatatttaaaatgtcaatttcataaatttgctattagaaagctggtgttacacaattaactgaatggacaaaattccctttgaagtgagttcctgagcatttggtaaattttcaaggataatttatttaactttttgctgagcttcaagtttcttaagaaaccctgccaaatctcaaagtgatttttttagacatatgcagctgcttctgagttaacaatggagttttgctaggaccattaaaatctggaagcctaaaattctattttaaactcttctcattgtcagtgattagtcttaaaaaaaaaaagcattaaaaatgaaatcattttaaagggagctcattctaaaattctggccagaaaagcagggcaattttattgtaggaactattaatgattaataattcctctaagtaaagatatttgatgcccaaagaaagggaggggcatacctgaaacttcatctctgaccacaagggcagcctctctgtcttctgcttcttcagtggtcctggaggctatgggcactgcccctgcctgcccggggactctgccaccctggggcttggtggagcaggttgccctagctgcctctcttttgcatgtgctacctagttgcctcttactgcaatgtttgctttgggggtggacagaaaaccaggacgttatagctggttgcaagcataaggcatagcaatttgctggtcctgttttgaaagactgtgttttgaaattttgatttacaaaactgctttcatcaccattgaactacctcaaggcacaagttcaaaatggaagatactcaattaaaagctgtaaagcaaacagcagcagttagagtggcatacggtaaatatgcgtccaggtcaagagccctcactggagaggcagctggaagtgctttcactgggaagtgggagggctgactcaggggctggccctagggtcagtggctggacactgtctccattggggtggcactgggagtagttgtctggacaggcagactctctccacaggggtgatagaaagcagtggtaatttctaaaagtgcctgcatgtctgccatcaccttcagcctcctaagagctgatgggagctggactcagggactgttgccccactgtggagacaaggagtgggtactccagccaagtttgcagtctcaaatcagggttgttttatttgtttttaatacattttaattatggaagtaatatttgcctacataaaaaattcatgtaatttcaaagtatataaagtaagaaaaaaattctctcttccttctccttaaagagaggcagacttagaagtttggggcctctacttccccacctcactgcacataatacatgacacagaccgcatgcatatagcttccaccctaagatgcccaacacaggtatttttcactgaaccatgtaccacagatatttcccatgtttttaaagcaaaatgttggctcttttcaataaattgccattataaaaactgctacaatggactatgcactctacagcacgtggacctctactttatagaggtctctccaccatgagaccatcagctccatgggtgcagcaggaatagggtctgtttctgccctctgttgtgtggctgcacccagcacagtgcttgtcccatacatgagcatgccattacttccttcttgaatgaaagaacatagagtaataataactagcatttgtcaggtgctttctgtgtgtgagacactgttccaaaggctgtgggtgaatacattcattcttcttcacacaactctgtgagacaggaacttgacagatggggaaactaaagcacaaagcagttcagtagcttcccaaggccatgtgacttacgtggcaaagctgggatttgaacccaagctctgccacagtctgcaggctaactatcattaacccctgcaaacacatgcccctgtgtctgcgtgctcgtgttcatggttttgtgggagaggatacaagaaaagggtctgctgtgtcagaaaggatgcacattttaggaacgtgagtattctgcctacccatagtgtgcaggtgtctgtgctgcccatgcccttgcttactccagcattcctgctgctgtctcacactgcttcgcacaaccctcccctagagcacagggtccgtactctaaagactagctggcttagagtgatcatggaatcatggggctgcaaggggttaaagatcctagagtcatttctctcgtgacctggtggtcatgggagagtcgtagtgatgacagtagtggtggttgattgtgccttgccaaagctgggcacattgcttttattactgtctccactgttcacctcttacaacaaccttacgcagtacaggtccaattattattgacatcttacaggtgtggaggaaactaaggcttcacagtatcaggtaacctgtccacagtcttctgacatggaagtgacagggctggggttagacctggcctgtcagagtccagagcccaccttttgaactcccacctgtcctgtcccatatggtagtgctgtttggaatcacatatccagtctgtacagggctcctgactccccctaaagtgccttttccttaataccctacttagatgggaagccaaaccctggaaacctttatctagcatgggttagctggttgttgatttagaacaggttcttaaagacaggtgtttgtgtaatagctgtggaaagggcacttcctctccgctgttctgatgctgagctggattcctagcaggaggggtctggggcaggcgggcgtccattgcgtgaggcaacctggctggcagggctggccgcgtggggccctggtttggctgctgttgctgccctctgctgcttcataatgaaattgcctgtgttcaacctgaaggggtcacagtggccgacttgcttaaagaggataagaagaaaaagaagttttgctgctttcggcaacgcagggctaaagatcatggtaaattgctgagactgagctttctttttccgcaacatctctgataccttttccttgcacataggcattgtgtgaagtgcatgtgccgtgtggtgtgttcagaagatgcctatattttaattgcttgatttctttcttcttgtctttttccaaaataatgtgcccttaccaagatagcattgcagttttctttttgtttgaactgtaccttataaagaagcagctgaaccaactcaaaaaatgtacttgattcggcatgaatattcttagactggaaggcagacttttaaaatacttttccccaaatgatttttttaaatttaaaccgtttagaaattccaataatgttatttgattgatttttttttctccaggctacatgtttcaaattgcttctctgtcttttagtctctggctactttgcccaggactatgccaaagctagtagtggcagctttaagaatgaaattagctggatgcagtggctcacacctgtaattccagcactttaggaagccgaggcaggaggatcacttgaagccaggagtttgagactagcctgggcaacaaagtgagaccctgtgtctaccaaaaattgtaaacaaagaagcaaacaaaaaaatcaggtgtggtggtgcatgcctatagtccccagctacttgggaggctgaggcaagaggattgcataagcccaggagttcgaggctgcagtcagcgatattgcgccattacactccagcctgggtaacagagtgcgatctctgtctcttaaaaaataaaaataaataaaaatagacttcagggatgcaaagatttgggggcacttgcctttgaaagtgagaatgggctcgtgtgggaaagttatatttccagatatgtcctaaaatgatgctaaacatacccttcctcagaatccctggagtagctgtcaggcccatccccaggcagacagttaggtgagcagctggctccctgccttgctctgcccaagtcatggcagtggttcgacagcagcacaaagctttgcctatgcacaccagcacagtcgacccagttctgccaccaggatcggccctggtcacctgactctggggaaagtctgtttaaggagattcagaccgcagggacgtgaagccaacaactaagggaacagaggggacacactgtactcttttctttgaagtggcctctggccccatgggaatgctgagctgagaggttatgggacgcagatgggaacaacccgtggatatctgaagagggttatattagagtctaggtctcatcagaaggcctaaaagtgaaaaggaattaagagattatcagatataagcccttgtcattcagcacgttgtggaccccaaaggagggagaagaggaggtggaacttgcctgaggtgggacagtgagttaggggcagagttggggctgccttttttatctgtagcattcacggaaggtttatgaacaggaggctgggcttgatgcagcacctgaaggtgtctgcaagaagaatggccttcagctaagcaggaaatagtgtcatggacataagaaaaaacatctttaaagactgacatagggatatagctctggagaggttaccaaaaggagataaatgatttctgtccccagaaaagaaaacacccctccttggttctgccttgctgaatgcaggcttgggccttgtgattctttaaggattcttgtgccttctccattgtctttctgagatctgcagggagaggaagcaggctgacacatttaaggaactttattttgagtgggaatggctttttattgactgaaatacctggggactcaggaaggactccgaccctgctggcaccaggtggggcacgagccctcatatggatgctgggctgcccctgtccctgaacacgcggagatagttattgtctgggcataattcttgcttgagacatggaaaccttggtctggccttgacctccattctccaagaagagcctggcttctttacagcagcaagaggctgttactctgtggtggcctaatgtgtctctactagcatgtgcatgtgcctttagggggtgtgtgggcttcttctggatttggcaggcctgtacgtcatggtactgctcatgtttgtcatgaaaataagatgaaaacatgaggtctaggtgtcaggtaccctgtcccctaggaaggcagccacaactcagccactgctcagttgtccagcctcaccccctacccttacctttgaaaagaatgagaagctttaggctgcttggaggtggaaggaaatgctaaaataaattcctgagtgtgcaaaaaagtctgtcctgtggagaacagaggagtgaggctctgaggccaaagacatctgtgaatgaggctactaatgggacaggttctagacgaggctggagggctctgggctcagtttgatgtgtggcaagccttcccttcggggtgccttgactggaggactgaggctctcctgtgacgccctgaggcctctggggagctactgcttcctgtgctgcaccccattctctgggacattctacatgcagagcacttggactcagttctccagtgcaggctgctggctggacccctggcttccctcctgagggtggtgggcaggggctcacttcttgtgccctcccctccttgcagagctgggggaatgcaagggaaaccccctggttgttggtagtaaaaccagccagcatgtgggcgtttctgccttcctgcagttatagcaggtcagaggtaaatggatcttagagatgatactgtcctacaactcatcttacagatctggtagccaagcataggggaaaagaggcacttgtcccattgtcacctgatgataagaaccaggctttcctgacatttcttccatcatttttgacctcatcagcctccatcactgaaggttgatctgagattttgctatacctgttaatggtgaacataattttgaggctgcctgcttaggacccacacatagactcatttgctctgtgtgtgtgtgtgtgtgtgtgtgtgtgtgtgtgtgtgtgagatttgcctccaaattcacaagcctgacacatttggctgagatgaatgtcgtccttcagcatgagagtagatggataaatgtctacaccttggtgaaaatgctagttgtgcttacctgagaagcagcagatttccctggtttactgtgtgtggcattgcccatgataacatctggcccagtgcaagatcttaaagagaagcaccatgacccacatccacagagtgctccaagtaggggcctggcccggctgcccatgctgcaaaggccttggaaactctaattacagtctgggacatgcagggctgctgtctgccaccatcctctcacccccagtggcacccaggccccccgccaccaatctcagtgcaccacactgtaagcctaagggtctgccctggagctcttcccagagatcccaatgcctggaatagattgcaaaatataggccttgagcttctccagattttcagcaggcaaattgcagtgccagcatcctctcacaggtcacaggctttcctaatgcttggtttttcccagactcactgaaagtagtttttaaatttatataaaaaataaacttctctaacaaagctctaacattccagtttcctgaaatgtgtcagggaagaggcttcacagcttgttcatgtgcagatggcccctggtgcttatttctacagtaggggactggcacttgtcggcaatgtggggaggtctgaggggtctgcctgcacctctaataaggcctagccacttgtcagcaattaacactgaatccctgctgaaggggacaaggccatcacctaaatggggcagtcacaatgctatggaagccagttaggagaagcccatgtattcgggtaatttgcccatggctttaccttcatgagtttgtatgactctttctgtctggatttttataaaagcccagtcgtcaccattgcagcctgatttttgtgctgtcgtcggtcactgagctgatatcctgtaagtgatctggttatatgccagattttgagtggttaataaaggtcatcagaatagtaaaccagcactggtagataatagactcgtttggctttttggaacttgttgatttgtggaattttaagtacataacaccaaaatgtataccagtgaaaccacagtacatacttgaaaagaatggtgagtggaagttaggagagatttctcagtgtcagctgtgtgtcccaaggcattttggcgagttctgtcctctgagaaatcaagagtttgctcacgtattctcagaagccccttctggttctaacagtctatgattcttttctttattttttaaaaacatagatgagatcctattggggctaaaggaagggaaagtcatattaattttttaacattaaaaaaatgaatgcctaatgcaagtgaagggtaaaatgctttatttttaataaatgaggtctttgttatacccactgagcctgatcttttcaaatatttttggaaaaggataagtgtgatatttcttctggaaatattttggaaaaggatcctgtgatagggagtaagtggctggagaaggtaggctgccagggccctggtcagagtgcgtttcctctgcccagatttaggggctggatcaagggctgtttccaggaccaaatgaggtctccaatttctagcgtaggcactgtcctctttctttccgtctgcctctgctcatcctcagccctggcaacatctttttgggatatatttatttattatgtgcctgtggctctttaggtgtcaaacaactatgacaggagaagttgctatgcctacagtaggcaaagttagacaataactcagctaaagacagagaaaatacaaaccaagaatgatggccaaagctgattcagaggtatggaagatggctcacactagatgcgtctgtgcaatgatgaaagtggccagggcaaaatgacactggattggtcgctttgcttccagggagctccaggagagcttttctgagatgatggagttaacatgtgtgggcctcactgatcatccagccctggggacccagcactccgcatgcctcatctcattcttacccttttacaggtgaggcaatggagatgtacagaagtcaggtcacaaacgcggggttaaacttagatctggccaacctctgcacctgctctcagccactatcccaacccagctgaaggacagaatcagctcagagagcaggaggaccctgcctcaccctcagtggagccctggcacagtgctgtgagactatcttcccctctttgttgctgtttggggagttcggttttacttcttgtctttccccacagttagtctagggagcaactagaacatttcatacactaatagttggcagggggccagaaatgctaactgatgaccccattcccatagaaaatatgtaatttatctgtttcaatcagattgtttttaaaatgaagctttagaattgaaatgctgcaactgtaccgatatcagcatgagacatgactccagagattaaaaagccacaaagacttagtcttttcagaagtttgctcttttgaaaataatgactaatgttcctacatgattaatattagaactatgagatagcaaactgttaaagatggaaatgaccctcaagattgtggagttcacaccaccattttagagacaggaaagtgaagcctggagagaggtgatccattgcccaggagactcagaaaacaggaccaggcctgtgggttccccacatcatactgccctcaactcctggtcccctcagtcactgcagtaaccaccacggaaaatgccgcacagagttaactcatgatcagatgtgaaaagggtctcccactgtgattttctttgttggatttaacaacctcctcacctttctgctgaatcagagtgaggaacagtcgaggagaattgcatgagtagcttcttgtgtgtctgtgtgtgttaatggagtttttttttttaaggtttttccatgattagagtcgtattttttgtttgtttttgtccagttttttttgtttgtttgtttctgcatgaaataatgaaaaagtaaatcaaggtttgtaattggtttcttctcacttaggaaagaagaaaattattctatgagagtaccagcaatgtaacatgagtctataattttactcacttggtcttaacttttgacacccttgcctcagtgttcctgggcatggcgtggaggctcccatgcaggcaggctcagtttctcgggcactcacaagcggaacggatcagggatcttctttggtatcctcaagaaacttctcagaccactgggttccttgagccaggttccacctctatccctgctgttacctttatgaagtctgctatgagcaaggcgggccgaacacagccccctacgcgagctgcctgatccagctcctttccccctgagcctgggctgggcctcagaatcttcgccatagcgcttccagcccactaccagtatttgcagatgaaacttgaggcatccttgctaaggggagccacacgggcagagcccatgggccaagctttcctgaagacatcgtaaggtctgtaaaaacagtcactacagttcaaagccatgcctcaggaaaaaggaagtacacgtggattctcttccgtgacttcctcttttacctctgcaccccggcagaattaatccttctttactctggaacctcctgcacagacccctgaggtagctctcttcacagctgatggaagtgagctgggggctgcctgtccctcacccctattccaggtgggtgcagtgctgtgtgccctctttttgcccctgccctcctccactgcctgggctccagcacgtgttcgtgatgtttatggggttgaatcaagtggatgagaaaagacgctcgtgcaccagatggtggccctgggtggaccctggacctccacacactagtgggcgtgtttccacatttcctctacttccgctcaggatcctaccatggagaagtgggatgggcccagagaccctagtcatactgagaccagagtcaaccttgccctctgctcactggttgataatgatcttcttcttccactcgtaacactataattccttggtgctctagttgttcttacccagcttactgggtaagaactttctgcgtattggcttcacaagctcagcagaacttcagcatcaggtaaaatagcaaaaaaatagagttcttaactctaaaaaatgttgtgcatggtaccttcatgcactgccttccccattcacaatagctcttctccctcagtatatttaagatgattgactcatgaaatgttagggttattcacagatgttctatatgcaccttttggggcaagcaaagatgtacctgtaaagtacattttggtggcttctcagtgtgatcccagagatgaggaggataaagtggtgctatacccagccacaggattcactttgatcccttagcttcctttcttggaaatgtctagggggatagaatgtcctcctcgagggggactgtgttccctacaggccatgggtgcagagactcgcctgcagtggagatgcctggctccttggcactcccttagcccagctgaggccctgagggcccttttcaccctcctcctgggttccggaggtctgcctggtggcagaggctcccacctggcctgcctcccaggcgtgcagtgtgccccgcatgctctctgaagcccgtcttctccccacagctagcatgcccaccagcgagactgagtctgtgaacacagagaacgtcagcggtgaaggcgagaaccgaggctgctgtggaagtctctggtgagtgtggggagcacttgccctctttcccctcctgttgtctcagagaagcaggtggtgaggaagaccgcccaggctgcagcagagccccgggccatcgccttgggtgtggcgggtgggaaggctcctcgtaccccacgccacgcttcctcctgtgccagggctatccctcctgcacacctccccaccccccgcccccccgccccccggcccagcatttcacatgcctcttcctgtaagtagagcccgtgaagaatgtggtggttaacctggccacctgctgtgtccattaggtgctggtggagacggagaggcgcggccaaggcggggccctctgggtgtcggcggtgggggtaaaggcctgattctccttccagcctgggtttggcatttgtgcttttgaagaagagcttctgtggcagagttgctgactagaatgtgctacgtatttaagttttcctttgctcatgggaccttcctaacctcaggcctggcggttggatgacgaggccctgccttcttggtgcctggcactttttccctggagccctgcaccagcctctcctcatgatggaaggcaccattgcattaacactcactggcttttttctagatgatttgggctgtggcagctggcgggggggctgggggggaccagcagtgcagaatgtgctgggcactgtctgccgtgggggagccctgtgcggtttggttttgtttgcttcttgctggtatccttcaggtcttatctctgtaaagtgcaggtgtcatttttaagagaactcaatcttactcttggcagagtttcataaaaatgatgtgttatgggcagaatatgcaaccatttgtgaagtgattttgcctccattctcttgctctgccctctctgagacatcatgaagcagacagagaatgggtttgtcatccccactttacagatgagaatgctgaggcccaagacctgctgctttcccatactcacccagtgggagaatggcagtgctgggactcctagtgcagtgctccctctgcggtagtagcagcaaatgctgctgtcgagatgagtggcaggagagactctgctgccttcattttggcccctgcatcactgcctgctgccagggcctgcagggaatctggccgagtcttccctgacctgggcctcgagggtgctcagtctgctcctctggccctggcagcatcctaatttctgctctggccttgcccctgctggcctgctgtggtaaccaggggtgctaagtccaggctgtatgcatggcttttatgatatctcagctgaaatgatggggagtgtgtgctcaagccctcggaaccagaatcttaacactttttgtctttctttcagtcaagccatctcaaaatccaaactcaggtcagtatcttctttctgtttcttcgtcagcctgtgtgttgcctttgtatgttctcacttctgaattttacgtagtattgctctggacttgagttttcctctgtggattataacattgatactgaattgcagtcagtcaattgaatcctatgagcctggcttagggggagatcttaggtgccaaagatctccctcaaagtaaaccaataagactcagtaacgagttttgcctccccattaatcctccttatcctctgagtcattttcctaagagagctgctgcttgtcacttttctgctcgaaagctttccatagaaagggagttcaagaagtcttccaaggtactagcatttcttgatgtgcatgcgggttacgtgttcagttggtaaaactcattgaaccatatacctatgattagtgtactttttcatctgagtgtcatttttcaacaaaaacattttcctactatatataaacactaacttaaaataggcaaagacctaaatataaaatataaaatcatgaacattccagaaagaaaacaggagaaagtctttgtgatcttgagttatgcaaaggtttcttaagatacaacacccagtatactttctgtaacagaaaacaaacagataaattggtctttgtcaaaattaaacttctgttcttcaaaagaaaagaaaaaggttagcttcagacttggagaaaaatatttgcaaagcatatttgataaaggactggtatcccatatatataaagattaatgcataaaggagagtgtcaataatagaaaaacccaataaaaaatgggcaaaatttttaataggcatttcaccagagaagagatgtggatggcagataagcacatgaaatgaccatcagttgttacaaaaatgcacattaaaatcacagttagataccactacacatctattagagtgaatcagatttaaatatctgacaatgacaagttctgacaaggatgctgattggtgggaactttcatacagtgttgatggacatgtcaaatgacacagccgttaaaaaaatagtttggtagttcctcataaagtttaaacatatatttaccacgtttatatttggcccagccatcccacttctaaggtgtttgtataagagaaatgaagatatatgcctacatacaaagttgtaacatgaatgtttgtaccagttttattcatgcttaccccaagctggaagtaacccaaaggtccatcaaatgtgaatgggtagacacactgtggttcaccagtatgatggagtactagttcatgtctgctgagttatgcatcctaggagaaacccagctgtgagcgggacagtctttagtgtccttagtagagtttttccacgctggccaacatgttagaagctgctctttccattggaacctgcacagcaagagtaataataaaatacaccttacttgatccaggttttggtaaagagttggcacaactctttctctgctcacttcctgggttacagattttctttttgcctagcaacacagctgagtcagccagggctgcagcttgggtagcctggagattcctcttgactcaggcccccagaggaagtaccccattgtcgttagtgaggcagcacagcctggagaggactgactttaccaattggctgacctttccacgggatctgggtcactgagctgcagctcatggcacactttaccaaagcatccccttgtggcagggaaggttttctagaaggagacaggctaagggagagaatattttctctaatcacaatcaggaactgaaggtaggtggaggacatgctacttgtctgtttggctgagctcattttatttttatgaaaacacgattcaatattggctcttctcctaaaggtatattttgagcatcactagttagaaagggcacctgatgactcagtatgaagattcatgtcctactcagctttgacaactctgccaggctctggaggaacctcagagatttaagaaaggattgaaaaggttccctttaaaaaaaaaaaaactagctttgtagcactttgctgcctggtaaattctgtatggtgattgagatgctgcaagagatgtgtataataagcgaagtggctctctgcactgattgcatgagcagatccacgtcccatatggtggatataggaactgcatatgtgtgcaagtgtagttttgcatctgcacgtgaatctatgaatatctagattttctaacccacttaagggctgcatatgacagattctggagttatctataagccataaggaaggactgatagcatgatcaagtcaagattatacttttaaaagtcgcattttaagaccaacataatttttatgatgaagtctgttaatttctgtgccatttgtgctcatctttctttcctgcactcccaccccaatctagacctccagagtgaaagccaaattatctctcaatcatatttattggatactcagatgctgtatctgtcatctacgtagtaatgtttgcttgtcttttagccgacgctggcgtcgctggaaccgattcaatcgcagaagatgtagggccgccgtgaagtctgtcacgttttactggctggttatcgtcctggtgtttctgaacaccttaaccatttcctctgagcactacaatcagccagattggttgacacagattcaaggtacaagcagaggccattccttttttgttctgaactagagatttctgtggctgtccaactgccatttggtcttatctgatcgctgcatgatgaagtatcgcaacatttctagtgaggacaaacttggtagaaccatccagacacagcaactaccagagcgagggtgccatctgtgccgcgtggtgaagcaccttggagccacttaatgccaagcatctaattgtcctaaccctgagccaacctaggaccaagaattcttgaagctggaagggacctcgtaatccctgctccctgccctcatcggggaagcttcattttcccctatagtacttctggcaaatggttttggttcccctgctttgaatgctccagcactggggtgtgggacactcatccctagagacagcccattctgggtttgacagttttgagcctttgaaaagtccttcctttcatccagtcaaacccgtttccctctacctctccagcctgcttggtgatattttcagctgttagaaatgacattgataggtgactgcttctgatatcgtcatgccataaatgaattcagacagatcttttctgtgtgattgaatgaaaaaatatgtataacctgatggtgtcaacgcagaatcgtaggcttttagggctggaaggcgtcagagattatgtgatgagctgccccttcccattttgtcatcagtgacactgagacctggagaaatcaagtaacttctccagagtcacacacatagctagtagcagaagcaggaccagaacctggtggacagactgtccacgcgaaggccacgtttctgtcctgagtgaggtagtgaagagagagacaaggtattggcgtatttcctgtggggcctgatagggagggaggtgtgaggggcacgagcagtctgagtgtcttgcaggagaccctgaggatgggtgcccctttgtctttccagatattgccaacaaagtcctcttggctctgttcacctgcgagatgctggtaaaaatgtacagcttgggcctccaagcatatttcgtctctcttttcaaccggtttgattgcttcgtggtgtgtggtggaatcactgagacgatcttggtggaactggaaatcatgtctcccctggggatctctgtgtttcggtgtgtgcgcctcttaagaatcttcaaagtgaccaggtaaggaaatgtgggtcccactgcaaatgttttatgaacatgaggcggcaaccagtcacatccccgggcaggtgatgttctgctctgtcctgcatgggtgttctgagctgacaccctcatcttgacttataggcactggacttccctgagcaacttagtggcatccttattaaactccatgaagtccatcgcttcgctgttgcttctgctttttctcttcattatcatcttttccttgcttgggatgcagctgtttggcggcaagtttaattttgatgaaacgcaaaccaagcggagcacctttgacaatttccctcaagcacttctcacagtgttccaggtgagtcctccctccattccccgaaaagcacttcgtgagcagcagctaaaactcctctgccttcttgtctgctcacactcaggaagacaaaaggactccatttttgttcatctctgccctaatcatagcctggtaaattttgtgccatttaagttattcgttctgcatcatcctccagctgtctatcttaagtgatgtaatttttttaaagacttctagctacattacaaaataataaaccaaaaaaaccgtttttcacactcaagctcttccaagaaaactttttgattgattttatgaggtttctttgaaatagactctaaaattcttttctctttggtactttttgatggcaggccagttcataatcctagttataatagatttacacaagaagtgaattctcatgcctccatgctttggtgtgtagttggaggaatcagagtggtaggaactgtggcagccattggtcccttctgtcctcctcctgggatgcagtgaggacacaaagattctgagggtgcctgtcctgtggggcctctgcaggcagtagctgagaagggagcggtggttgcagagaggcaccgatggctctgctgctcagagcagcagcacatgctcccctgactctacgctgaggtgctcaaaaccctcctccttggacagggtctgatggagaagtttaaaagacccacctgtcctcattgcttttcctgtgtgatgtgagctgcagagccctgccagagaggaaaggcagcagacagctgggtcctgtggtggccctttccatgcccagctctctgctgtggatgagtcacttacccatttctgaagaaatccagagaccaaagggaatgatctggacaattctctcccacttggtcattttcaggtatatataatctgctgtaagccatagtattgttgtttgaattatacttaaattttggctgctgatcagtgattcttttttaaaaaaaaatttctttcagagaaactggtgtctttttttttttttttggtaatgcatgcatatggcacaaaattctaatgttacaaatgaataataattctcccagccagccacaaatttcctcttctaggaagcaaccaccattaaacagtttcttgtgaattcttagatctgcattttctgatagctacaactcagttaagctacctataggagactttccacagacaggagctcactgtacgtgctgttttgcatcttgcttttatcactttgagtgtcctcaagagccttcctgcttggtccataaaaggctgcccctcctttgaaacgctgcgtccatgcggtggtagatgtgccgttgttcatatgaccagtcccttgctgacaagcattgagttctgtctggtcttagcccacatacacagggctccagtaggtgaccctgaacacgcatcagagggcacatgtgttggctgtagatctgtgggataaactcccagagatggaattgctgctttagagggtgtgtccattttaaatgttgacacacgtgcccaagtgctctccttatggttgtattagctcattgtcttcacactgcccattgcctcactgcctctcccctcagtggagagcatgctttgggatgcccatcagttaggtgaaaatggcatttcattgtacttttaaaagatactgttcttatcaggagtgaggttgaacgtcttttcctatgactcagagccatcagtagtgccttttctgtgaattactttatcttttcaaatcatttgcccatttttgtttggttgtgatccataacagtttaaattttaaaaatatctagttcagattgaagataaaggagctctgtctgtcgtcggaagatagcatttttttcattactgttcttattcatctgattctatttcatcatggattgaattatcaagtatgatcagtagagaagattaaatttcaggtcattggtgatatctactcttgaggtagttttgtaaatttacatgagacatttagaatttcctgcttctgtaatttcataggtataattatccatttccacagttgatggactatgtggaatgctatgcagcagttaaaagaatgagatgcaccttctgacacagagggtctccagagtatgttgttgaatgaaaaaacaagccagttgcagaaaactttgcatagcatgatatcctttatgtctgaaaactcagagaagacacctagtgcttgttttctttgtgtgtaaacgtgtttaaatctgtagttgaaggttccagagagacacagaaagagcatgctttctggggaagggactaaaactgggctggggtgtaatcaaaaagcacataaatcttggctgggtgaggtggctcatgcctgtaatcccagcactttgggaggctgaagtgggcggaacacttgaggtcaggagttcgagaccagcctggccaacgtgctgtaacactctctctactaaaaatataaaaattagccgagtgtggtggtggtcacctgtaatcccagctacttgaaaggctgaggcaggagagttgcttgaaccggggaggtggaggttgcagtgagctgagatcaagccactgcactccagcctggcaatagagcgagactccatctcaaaaacaaacaaacacttaagtcttaataataaggttattttttttcactcaaagaattatctatttgtgtaattaaaaaacagtgttttagaaattccatgggataacagatggatttgttcagtgcaaactggactgtgaaaggcagcttaaaccagatctaggcagccaccgaggggctctaagagagcggctgcaatttgtgaatccacctgctggctgataccagtttggcttctcagatcctgacaggcgaagactggaatgctgtgatgtacgatggcatcatggcttacgggggcccatcctcttcaggaatgatcgtctgcatctacttcatcatcctcttcatttgtggtaactgtatccttcaagccgaccaggctttgttgttgccgtcgttatctggttttgtttttcttcctctgcatttctctgtggtgatggtggtggtagtagttgtggcagggaggtaaatgcctttaccttattagctcaatatctgcttttcttccatgctgctgggggacagcgtcctgtaagcagaattccagagaggctttgagggatgcgctctggctaagagaagcaagcccagggaaggagcgtgagacagcacacatactggtcccagaggtcactcagtttggcatcatgtctcctgtacaggtcccgagggatggctgagcgcaaggccaggtggttctttatgttatcattattgggagcttaggcgtccatctgtgacttcctaagacccttcgtgactgatgagagccatctttgtggactgatctgtgctcccctgggctaatttcactttgctgatctgtccatctttgcggatcaagtgtccattggctagctgctaaatcatgctgcataacttctctctgccttactttaccccttttccctgtcgagaggcaccctctaatcctagacttctggaattggcccttagatctgtatttacctcattcagacccttcctgatcctatagcctttggttctcggtgttttatctccaggtcctccatgcctagcaccagacctggtacacagaggcctttaatgaatgtttgatgcatgaacgacgtacacactcatgatactacatctgggttttcacccttccattttaaaaggtcctaatctggattctgcttctaaggtggcccagatctctgtaggtgttttcttctttatcttgtctggctcactgataaattttcttcagtgtggtaacctcagtgcaaacctgcccccttttctacaaggacaatgctttgtgctataaggtattttataaaaaccccatctcaacacatatacatccttgtagtcccttgactcggctctaaggccccctccacaagagccacccctgccctgtctcccacccagagaaggttcttctacctctgagctccccctcagattttatccacgtctcttactgcctgtaggttcttctgtctactggatttttatttatttattattattattttatagaaggagtctcactctgtcacgcaggctggatggagtgcagtggtgcaatctcggctcactgcaacctccgcctcctgggttcaagtgattctcctgcctcagcctcctgagtagctgggattacatgtgtgcaccaccatgcccagctaatttttgcatttttagtagagatggggtttctccatgttaaccaggccggtctaaaactcctgacctcaggtgatccgcccgccttggcctcccaaagtgctgggattacaggtgtgagccactgcgcccggcctgtctactggaattttgagtgggcattcctccatctccctaactagatggataagcttcttgagtcaggaatctttttgtattcacatctctcaatagagtacaggatcttgcacatagttggcccttggtaaatgaaaggtcattattttctttttctgctgtcctatggttgactctttaggccacagcaacatcctggacttgaatctgcagagaagtattccctggtgcttgtctgtggttgcatgttgttttctttatagcacatgccactgtatcagaggtgcttagggagctgcttatgctctgtcttccccaactagagtagacattccagtgtgtggtgtttcttcctgtgccctcagcacccacaacagtgcctgacacattggaggtacttggtagatctttctggatgaattccagagcatgccactctttaggagggtctgagtaatgcctctcaatacagatgatggattttgctctggaaagttgttacaagcttgtaagatcttcctgtggctcatcactctggatttgctttccactacccaaaggagttgagtgtcatggcaagactagagagattattgtttcttcactgagatcatggagggaatactcagtacagctagtctcatcactagcccctgtccgagttaccattaccccaggcctagcagaggaatgctcatgttaccaagccatctccagcccaggactaattgcttcctgaggctcattgcagctccagttaaaaaataggccagcatgtcaaaggctttttgagtcttaatgtaattcacttacgtttctctcctctttaaaaccttgaatagattagtcaggcgtgctattccctcacagagatttcatcatctgttccttgttaggttatgttggtttacgtgttcagcaacccatccaagacaacaaattgcacagggcgtatgggacagtgctatgctgctcctgtctcggggtctctgggctcctgcagttttgcctgcagatggccgggcatcaggcagagagaagcatttgtcacagaagggggccttctcacttattgccctctcatccctgtgcttctcaaaaacatgcttcactgctagtgggtaagaaacaggcatcttctgatttaggagtcttgttcagaatacttgttaaaaacaaaaacattcaagaaagccatgtatacaacattagagtaagagtgaaaaaatatgataatttgttcagtcacctaaccttttattgtgttttttaactggaactgcaatgagcctcgggaagcaatttgtcctgggctggagagggcaaaaatcaagttcaggtacagtgatcaaagatcgagctgcagtgagactattcacaacagtccagcaccaggtggcagtaagtcagacacattatagtcagtcagtgtttgtggagtgaaggaatgaatgagttatctgtagactctgaaggttatttcaaaggagaaagtctcatactgtcttgtgcaagggcatcatcatttgaataacttgcaacctttgaagtggtctgttttggaaagcactcccctgaatatatatgttgtagttgtagtatgtgtttaaaaaaaaaacccaaactactttttaattataccatgtttatgttatagattgttttataaaatgtataacatagctatagatacgtagatgtttggacacacacacacacagagaaaggttgaaattagtgggttttcatgggttttagtgaatcttaattttacttctgtagactgtccttttacaggtttttacttttgttttgttttgttttgttttgttttgtttgaaaagcagggctctggtactctagttttgctgtgtgagtataacacttgggacggtcacttactaccagcttcccgggatgcagaggtgtgtggcgttgccattgttggccgcacgtagttgcatttagtagtgtgttgtgcccttaaaaagttgaaattagatattctactgaatgtcttcttggccatcgctgtagacaatttggctgatgctgaaagtctgaacactgctcagaaagaagaagcggaagaaaaggagaggaaaaagattgccaggtaaccctattttcccctgacgtgtttgtccaggggctgtgttgggagccctgcaacagttgcagcctgccaggcttacccccgcatcacggcagctgcagcccccgggttgctgctttgtggatcatggttgaccatgcactgcagaccaaaacggatggaatcttgggcagaagccaggctcttggctgtcatccctcggggctgagagtgggagtcacgtgtccccatgcttaaagaatcactgcagttaattttggtgtcataaaataaatgatgcattcaatgctgattagctctcagatgagaattttaataagatggtctgtgtaatgaatccatcgcattgagattaccaggaagctctgagtttgggttgtgctaggctcttgtggttagtgttgtttctaattaaattctgtccttcattggagcattattgattcagaatcctgattagcatttttatacagagtaacatggttatttggtttcttgtgctcttttctcttctctttagaaaagagagcctagaaaataaaaagaacaacaaaccagaagtcaaccagatagccaacagtgacaacaaggtatgtattctaagatgcttctcccctttttgtttcaaaatgatcctgttgatctccatacatgtaccatttacactgtggaagtgtcttgtgtatcattcttgtaatattttggtgtgaagaatatggcacaccatatagaccctggcttcccaggggggattctggttgaatttaggcagttagttgtgtttactgatatttcaccagaaaaccaatatgataaagaattgactagtttgaccacttatgttttctttattggaattgtgcaatcagccctgacccgtggtcaggatcacgttagcatcttctgagtgggtatgaaaatcgcggatttttaatagatgtctgtttccagaggtaatcccaggatcaggtggcctcagggctatactgtaaaactgaatcccatttatgacagccctggttgttttgttctttctctgttcatcgagttgataaatgcttactgagtggctatcatgtgtcagacactgaggattcaggaatgaagaagacaggtccctgccttcatggggctcacagtctggcaggaagacaggagtatgagatgcattatcacatggtatgagtgaatgtgctggcacagggcaaggacagagccctgaatggtgctggctaaccacgactgggtcagggttcagccttcttctcacctgccctcaggccttctgtctgaagcagaatcaccatctggggacatctgcctgtccctgcacactcaaatacagatgcagctttggggaggaatccatgccctatgctggaccaccagggtgacttttcctctctgaagtgattttaagtcagtctcccctcctcccaagacgtctttgtcatcctaggttacaattgatgactatagagaagaggatgaagacaaggacccctatccgccttgcgatgtgccaggtatggtggcggaggccggagacgctggctttgctgtgtgtctttgctactgctctgtgaccacctgccgagtctgcggccagccagcccagcagcgtgcacatgagctgctgaggccaccaaggccgtgggaccagttagctcgcctttttcccatggtcacaggcagaatgtgtcactcaaattccaggtgatggggagggaaagtgcaggtgggtcagggcagtcccagcttctgctgggagactggtccaggaggccccccggtgttagcgctcacctgacacttttatatttgactggcacatttattggctgatgtgggtgggactgtggagttgggagcctaggagctgattgagactgaaagtcccacacagtttctcaggctagtctgagcgaggaggttactggggaaacagccaggtgttgggaggttggcagtgagaatctcagcactgccacctttcatctgtggtcagatcttacgctggtgggaatctcatcattcccgcaaactaaacatgctcaccagacggggacacttctcagcaccccccacccctgcaacacacactcagtccatgttctgaaggagcaggagggttttgattcatgtaagcaggtagatgttgttaaagtttaagccaaatttgcatgtgaaattaagaataattcaaacccatatgtagtctttatttcatgcctataaaaaaagtatttcatttaaagtaggggaagaggaagaggaagaggaggaggatgaacctgaggttcctgccggaccccgtcctcgaaggatctcggagttgaacatgaaggaaaaaattgcccccatccctgaagggagcgctttcttcattcttagcaagaccaacccgtaaatactccccttctagtctctcacggctgcctcttgccagtgaccctacaggttgcttgagggtggctcgggtgggggtgaggggaagtggttcacagccctttctgaacctgagtgtccctggcgccctcacccaagtcccctccaacccctctctcctccactgttgctcttgccctcagctcatctcttcctagctgcctccttcccacaggggtgtggccaggtcctgggaggagctccattctaggttctcctccctgccttcacccctgcatggggacagcaatggggaaagccttgtccaccccagcatattccagctggagctcactgctctggtgttccatgcttcggccagccgtggaaatttttcctaatgagtggatcttctgttaggatgccttgtgggatgagaatttttgtgaccaaggtccgcatagcatcctcatcctcatagatcccccacttgattgatcagttttcccaattgagttttatctttgtaaagtcatattgcacagtgatattttatgggttgtaagtattcagttcagctctatgatagtctacttaaaatagcatttctcatgttaaaatgataaggtgctcacaaggaacagggtaatgactcacaagtactataagaggaagacgtttatttactagctagtttctaggttttaaatcatctgggactgagtggaatgccaggggaaataaatggctcctggaaaggtttctagaattgcagaagtagttcttggctgtcagagaacaactctttataattcattggccctagggagacacaggtgggaagcaaggcctgctggcatcctcagagatatgaagatgtgatggtagcttttacagctcaccactgtttgggtgttctttaaaaaaaaaaggttattaaactgatattgctgacacctacagccctttgtgtgtgtgtgtgtgtttgtgtgtgtgtgtgtgtgtgtgtatgtatgtatgtatgtatatgtatatatatatacatatacatatacatatatatatgtgtgtgtatatacatatacatatacatatatatatgtgtgtgttatatatatatatatatatatgttgagggaatgcatttattttcacctaaagctacaaagcactcctgccctcactagcttggaagttctttcccagactcaactgctaaccaccttcaggtcctcaggggggtacgcccagcattaaataggcccaaaagggaggacttgaagtgaggggtcgccttacataaagttgactccagtttgaaagtggaaaaaatcttttccaaggaaaagctatctatctataatagtcttatagaatacaggaatacagataggtatatatacatatacacacgtatatactttagaatttaaacatatacatacatattttagatatacatatatacacacatatactttacaatttaaatatatgtgtatacatatatttatgtgtatgttttatatatatgttttatgtgtatacatatatgtacatatacatacataaatacatacatgtgtatatgtatatgtttaaattctaaagtcaaacattgagggtatggataaccagttgctaaccaggcgcagggcacattgaggacagcagcgaggttctgatggcccagagagccatcgtttgagcccaggtgtcaggcatgagccaccctccattgcttcacgagaccacaggacttggtgagaactctcatgccgggccatgagatccttgcatgttagcaaatgatgctccaaccttcactttctgaggactgcttgtgggtcaactccaaaatttaaaaaaataataataacatctattacaaaatctgcagacagccagagatgtcctgaagtctcagttactgcaggtcactataaatagtatgaccttgcacctgcaagacaagcctgggattcatctcattctgtgtgaactgttgagggcaggcctggcctcagtttcctctctcagtcagggaagataaacagatgagtttcttgtcatagtggaaaaacttcagtgatgtagacctggatcgattctgcccctggtccttactagtgtcactttagaattctcttattaagcctcagtttccccatcttgaggaagacaacaagccccacttccaaggacttggcagagtggtctgtgtggcacccccagcacagaggtgacacaccacccacagtccacaggttgcctttggtgggcttcgagaggctgacggacaggttgctcaggtgtgccgggcagggtgcatgggcagcacagcagacagctgccctctgcctggcctcttgctgcagtggccccacactcttaaggacccagtgtgttccaccctatctgggactgtttccaagcagcggcttttccctgcaggatccgcgtaggctgccacaagctcatcaaccaccacatcttcaccaacctcatccttgtcttcatcatgctgagcagcgctgccctggccgcagaggaccccatccgcagccactccttccggaacacggtaagtccccagggtggggctcgctctgggatagccctggcctctctcgggcagaggccactgtagagatgggagctgtggaggccctcaaggtgacagctagagtaggtctttccttcagctggggacgttggctgtttccggtttgtaagtgccagagagcttgtgttttagctgggtaaatctgaatggaatcattaacttagaacttcatcttaaatactctgcaggaacggtcagtgaattcagggagcctgcttctccgcctctttgctccctgctgctgatatttaggtcctcctttccctccctgctcaggtttacactcacccctgttttgagattcatgcctcgtggaagcacacagcagggaggaagcagaattcaaaccaggcacaccacatgcccaggctgtcttgttcagggttggaggcaagatgcctatgtcgtgtagacttaaatacaccaagctgctaggctccacgactcaggagaaatacaagttagggagatgataggatgtcaagttgaggtgttcagtggagaagaacattaggccaggtgcactggctcacacctgtaattccagtgctttgggggatagagggggaggatcactgaaggacaggagttcaagactagcctgggcaacataatgagacctaatctgtacaaaaaataaaaaaaattagctgagcgtggtgtcacatacctgcagtcccagctactcaggagactgagggaggaggatcgcttgggcccaggaggtcaaagctgcagcaagcaatgtttgcaccactgcactccagcctcagtgatacagtgagaccttgtctcaaagaaaaaaaaaagaatatataatgaatgttaaaaaatttcttctctgggaagatttattataaaatatgtgattatgttatatatttcacaagtatctccaaagaaagtgctgaccttggccccagatagccaatattaagtttgagtaacttcatgaagcagagtgcaccaggcagagccacttggacccttaagcatgttaacttagcggtttacaatattacttttcattggtagaattaggaatatacaaagagttattaattggctgggcgtggtggcttatacgtataatcccagcattttgggaggccaagacagtagaatcgcttgagcccaggagttcaagactagtctaggcaacatagtgagaccccatctatataaaaatttaaaaattagccacacgtattggcacatgcctgtcccagctacttgggaggctgaggtgggaggattgcctgagcacaggaggctgagcctgaagtcagctgtgttcacaccactgtattccagcctgggtgacagagcaagaccctgtctctaaaaaaaaaaaaaaaacaaaaagaactctagattttggtgtggcagaggtggctatccagttagccctctgtatccatgggtttggcatccatggattcaaccaaccacagatagaaaatgtttgggggtggccaggcgtggtggctcacctgtaatcccagcactttgggaggccgaagtgggtggatcgcttgaggtcaggagtttgagaccagcctggccaacatggtggaaccccgtctctactaaaaataccaaaaattagccaggtgtggtggtgcacgcctgtagtcccgactactcgggaggctgaggtatgagcagtgagctgagatcgcaccactgcactccagcctgggcaacagagtaagtgagactctgtctcaaaaagaaaaaatattttgggggaaaaaatgtactgaatttgtgcagatttttttcttgtcatttcctaaataatttacatggcatttacttgaccttgggtatcttgggaaatctagagatgatctaaagtctacaggaggatgtgcatagattatatgcaaacactacaccattttatatcagagacttgagattttggggtctgagagagtcctgcaaccaatcccttatggatactgactgtactaagaaaacaagtcaagggaccgggagcagtggctcatgcctgtaatcccagtactttgggaggccaagacaggcagatcacttgaggtcaggagttcaagacctgcctggccaacatggcgaaaccccatctctactaaaaatacaaaaattagctgggtgtggtggtctgcacctgtaatcccagctatgcaggaggctgaggcaggagaatcgcttgaacccaggaggcggaggttgcagtgaactgagatcatgccattgcattccagcctctgcgacaagagcaaaactctgtctcaaaaaaacatacaaacaaaaatacaagcaagtcaagggttttctattagttagttttgtaacttagagatggtgcccgctgactgtgtctgtgttgtaaggaaacttgcacctaaattggctcttgcctcagcagccccaccttagctgtgcagcttactcggcactgaggaccattcaaaggcaagacggctagaagcagcagcctgttgactctcaggcctagatattatcgtgcagtttcaggttattaccaagaaacccgaccagcagagggaggctggcgagtgtgcaagcatcaggtgtccctggcttgctggtgggcacctttttctgagcaccaggttgttagagattttagggttaagacacacctgcagatctgtgcctccaggactctgttgggacaaccaagcctcatgctgttgcttcccatttctggagcctggcaagccctacctatcagatttatgaaacacgcactccgatatgaagagaaaaagtgctttccccatggtgcgtgttagtgtcaatataaagaggaaggcactgggcctgtcttgatttgtcctcacagattagggtttttgttagagagggtttagttgctctagatgccccaatagaagaaagacctctgtgtcatttcattccatcataaaaaaaggacacaagggcagtgtttggaaaaaaacagcattaggtgacaaactaggccaggagctagtctaggattcgcattgacaagggattaatttacatgggggtttcatgtcttatttttaattataactgcttctccataagtttatttccctgctgccttacccaaaaatgttaccgttctgcttaaatagatgtacatatgtgtatgagtattgctttttagattctgcagtgttttgtatgttttttaaccttagccgaattcttagtttaaaaaagagagcgagagaatgcaagcagagtgagggaaaaaaacagcttaaatttcaacttcagccctggcgccaggttgccttgtagacttgtgggctgcagtgtctttctgggctactagatgctttccatgttaatattcccactgtgacctaggaaggagtaaggaaaagttggctgaggcctggcagtgcacgggaagacaccttccatagcctggccaagaaactccattacacagaagtggtcccacagaattcataagtccaaaaccagaaacagtttggaaagtgaataccctctgaagagagagactgggcttgaaacagaggtcctcgcattattgtgacacagcccccaggcgactcctctacctccaacagctcacccctgtgactcttcgctggcatacgccaggcctactccttgctctgcagtgcctgtgactagctgcgtggcctatgcgtgtgtccactccctgctcccagcagccacatctgttaaaggattaggcctgggtggtctccacagtcccttctagctctggtctcttcagttctttcaaaaccatagatcatagttgtcatgaagatcagtggccaagaccaactcgcctttgcagataagggtgctacggtcagaagctcccggtgagcagctttcctggtggtcagacttcttgctgctggcccacttgcctccacggctccgaggagaagcagggaccccagaaagggctagcaggactctgctgatgggataatagatggtattgtcaccaatgaggatagagttgcctggactgaaaattcaaagaccaggtcagtctgttatttgagtgggcccagcaaggttttttaaaaaaaaccctgagtttagagagagcagtgtgagatgcagaacaacgggcaggagtgctggagaccaccaatgcaggagtctgtaaaaccatcccttgcagacttagccagcccagcgcatgagcagggaagggtgctgacgccctgattacacaggctggaatgcgagggggcatatggaagctactggctccgacagatgccgctgccatcttcatttatgcttctccaccaatctgatgctcagatggagggcaacatacttcattcagccagaaacgcggttaaaaatcgaaaatgtgtataagcctctaatttatttggtgccacaagtcgtttgtagatgtagcactctctgatgagaaaagcttgttaacaaagcactcttagaaatgagcctctctgcctgtccaagacacaagactgggaagcaagtcggtgagtggttaaaggaggtcaggattctcaaacgctctttgggaatgatgtaattgaccaaagtgggcattcacccgtggctctgcacttaccttcagaatggcagggttttcctggagggatgggtctctgactggatcgggggtttctgcctgtaagcatgcagatgtcagagtttgtctgaattccttttctcactcccacatgttgtgccttgcagatactgggttactttgactatgccttcacagccatctttactgttgagatcctgttgaaggtaatgaattttccttgatcttcacatactccacagcagctggagcaataatagttgcacttctttgtttgccttccagatgctaggttacgcagactatgtcttcactggtacttttgcatttgagatcattttaaaggtaacaggttacccggcagtgtgtttaagggctgctcctgcgtgtgacacacaggaaagaagcgtggagtgcttttgattttttatgggttttttttttgtctttcgtggttgagctaagttttttttttttgttttttaaaccgaaggatttttttttcctgtgaccattccaacttgtttttgctctttttaacctttgaatgcatgtaggagccactctggcttcatgatagtggttgagaattacattttgctcatttaaaaaaaataccctctgtaatttgtcaactgataacacatatatctctatgtgtgaacttttttccaccctttctgacatcaaagtcagaggaaaagcatttatcctatgaagaggatgtctctctttttgtttctctgactgcattatgcttttggggacctaaaatagtaacacactattttcttgcaataggatttgcaagatgacttgggtctatttgtgttaaggtattttctgtctgttttaatggatgggcttacatttacacaaaaggagcgccctttggccggggtgacctaaatgtactgcccatgcatgagctaatggctgccattgctgcttgtggtttgtggactgactgtgaagtctgccccatggggagcccattccttatgtgcttagagtgctggagaccacagcagagctccaagaacctatccaaaactggccaagaaccacagggcgtgggtcattgtggttctgggagaacgtggcccatcagaactgtcagggcaaccatctcctagcaggaagacaagctgggaaatgaagacttttaaccatggttttctttaagccattggggaatttttgtgtgtgcaattcaggcaaaatgtattttgcatcggactactgtggaacttgggctctttacaaaatcttatataaaatgaaacttcaattaatatggtcagggaatgaggtggttagttttttgaggttggtttttttatttttttattttttggttcatgaaacagcataaagccaaccaacaactgtttacccctttcttaaaagtcttctaaaaatgtgagttcattttcctgcctttaagccgatgaatttggttgacacttctcctaagtcagaggtgtgcagtgggatggtgaccagctcttgttgatgaggcctctgtgggagggcctgtggatgcagaatgcacagtggtgggggtcggagggatgccgccagaacactcaccggctcagcttctgcctcagcttcttggttttagaatttgacttcttttcaaagtgaatggggagctgttctacttagtctgttagcctggttaattgaggttttattttactctccacattttttagttgttaaatgaatatagttacccttgggctttggggaaaattagacacaggattatttaaaaggaaaaaaatgattgttactttttaatttctgtagaattgcttcaccgacttaaatcttctgagtcattcttcattttgaaggtattttagagaatggaaaataagctaaaacaagaaggattcagaaaatggagactcaccaagaagtgtctaatatctgagacgatggttcctggtggccttggggacatttggaaggctgtttggttatttgcttaagccctatgaaattgccatttttgtaggtcaaaaagggttgaacactggcgatttcataaggttcaatgtaatatttcccacctctacctctcttatactgtacttacctgagccttctccaaccttttttgttttaaaataaatagtgagctgtatatattttgctatttttactttggggaactaaactctttttccatcaccaatagaaatctcactgaagcacccataataggtgctccaggtacatgtggcaggtgagcacagagccgttgagactggctcaggtgagatgccacctggcttcctagccatgcctggcacgtgtcatcagacttggaggaattgcttaagatggatgcgtcattaaagaccattaggaacaataaggggcctctgtggaaaagtgacgtaggtccatagagcctgggagccctgaattcaagcccccactggaaaggcttaattgaaacaaggtaggctctaccagggcctcagaggggccagaaccagcgctttgtggggaagtgggctctccggacagcacttaccttttgacgaatgtagtcctgtggagcctctcttagacaggctctttggacatgccaacagtgtattcatacttgaaacctgtgatcactgtaataaagcctaaattggtttcttcttttaaaatgtatccaaaataagctggccctttttgattttggtttgaagaaattatcctgtggctcaaccccgttggtttacatttctgacttcttaatgcacacttgttaatgaagttatactttcctcaagattttgcaaagagcccaggtttcttttcctctggagacaaaaaatggtaaatcatccatgattctgcttctagatgacaacttttggagctttcctccacaaaggggccttctgcaggaactacttcaatttgctggatatgctggtggttggggtgtctctggtgtcatttgggattcagtaagtattctggggtgtgtgcccagaattgctgggctgaatggtttatgtaagggattttaacataattgataaaggctgggcatcattttcatgattatatttagttatataggtttatttaatttgctcccattccagaaagatttaaacaattcatgttttcttgtgtgtgtgtgtttttttctttttgtgcctgctgctaagttgagcttattactgtctgtgaaatttgctttcaactgaggtgaaagaagtgttgactaggagggagggaatctaggttctagtcctggttcctccaaaggctgattccagggccttgagggcatcctctctcaggaaccctgtgccccttttatataggaggggctggggccaggtggcctttcagtttttccagcttagatattgagaacttcctttgattttcaggatatagaacctgctaggactttttctttggcctcaaaatttttcagctaggagggagccaaggctgaaagtcagggccccaggtcttttccatggcatttagcgatttctggtgggaacagccattgctgagtactgcttaccatccccaggggtgtggggcagaggctccagtagagcatcaggtgtggccttgctttcttgctggcctgtgagcacttctgttcaggtgctgagcatagaatctcccctgtatgagcacacatgcacacacctgccctctaagctaaagagaagtggaaaggacctgccctcctaggaagaccaaaaacctctgcttggaacagccctttgtgttatccttctcgcctgccactgagggaaccctgtgatcatagcttggaaggccatttgcattaacatctttgcagctcctattaactcccaggctgttcatgtccaagctgcagccttgcccacttcctcctgagcatgtgttctggccacactcagccacctagggtaaagcagaaagctgcattctcttgtgtcgcatctttgtacatgctgctccctcacactggagcccccctccctattgtcctcgctaacccctactcctcctttgggactcacctggctatcaccacccccaccccagagtccttcccaggctccccctgccccacccccacaggttgtgctcccctggctgagcacaccacatttacccccgtcatgtgccacactgggttgggattgcccatctctccaccagactgtgagctccttgaaggccagagaagccctggtaccaaagtgctacagcagacctccaaccttaaacaaaaacaaatgatatatgaagcctaaaagccagctactacctagtatttacagtgagtggaaagaacaaagagagttcgtgagttgtgtctctgccaaggttagctgtgcacctgtcagcctctgtgagtgccatgggctgggcttgggaggtgctgcctcgtgtgggcggggaggagaagtcgcctctgagtcgtgaagagagatcagctcagcaccacatggatcccacgctaactgtgcagggatactaaagtgaagatccagtgaaagggtgaatctcaaagcatcctgtccatttataacacgctctgcctgccgtctttctgctccttccctagatccagtgccatctccgttgtgaagattctgagggtcttaagggtcctgcgtcccctcagggccatcaacagagcaaaaggacttaaggttttgattcctctcctccctgctgggctggcttgggttggggttggctgtaattactggctcttctgggcagagctgagctgaggcctgatggatttttaaagtgagttataaggacctttctaaccaattcagccacctgtgccaagtgctaatggcattttaaaaattattatttattgtctttatttttggtaattgaagatatttttctttgtaattattgttcatttattacctttttattagtagttctttgtgtttattttagtcttttatttagtttatttagtctttcagttttcatgtagactgtataaaaggctactgggtttctgttttcctgagtcatttatggggtggggaccctttgggcccatgtgccaggcagcactgcacctgtagcatttcttctttttttttttttctttgaaacggagtcttgctctgttgcccaggctagagtgcagtggtgtgatctcggctcactacaacctctgcctcctggggtcaagcaattcccctgcctcagcctcctcagtagctgggattacaggtgcacaccaccacgcccagctaatttttgtatttttagtacagatggggtttcaccatgttggccaggctggtctcaaactcctgacctcaagtgatctgcccacttctgcctcccaaagtgctgggattagaggtgtgagccactgtgcctggccaacacagaaactctcggctgatgttagctcacctcaaggccaaaatcacaaagaagagtcacgcccctctgccctctccgcagcacgtggtccagtgcgtcttcgtggccatccggaccatcggcaacatcatgatcgtcaccaccctcctgcagttcatgtttgcctgtatcggggtccagttgttcaaggtagaggaactgcctccaagcataaaactcaggtggatttctttaaggagaagcctgcatttacttaactgcctgtctattttatacccaggggaagttctatcgctgtacggatgaagccaaaagtaaccctgaagaatgcaggtgagcgtcctgagagtggagtaggggacttagaagagcaaatagcagacttcaaggattcacacatgttggcacgtcagaagttttggtcgtgaaataaaataggcctgtgtgctcagcttgtgggtagatagatggtgtttgtttttcattgaggtgaaattcacgtaacatcaactgttttcagtatacagttccttagcatatagtatccatggcattgttgtgcaaccaacatctctatctagttgcaaactttttgtcatcccaaaagaatggctagatggcttttgtggtggagaatctataaatgacgggagttgggggaaccctgaaataacaattatgaaatgccccaaatagcttccatgacagccatgtggatgatttccccaaatcagaatttggaactcaactccctggtgtttgggaactggctccctcttcttatacactttctagacttcctctctcctggctcctattacctacatcttggccatatttccatagacaagaactggcagaggagagacaaggtgggagatattcatgcctcccattccaggatgtccagtgaccatgaaggcagtcatggaagccattgcctaaagtttcagactgtgcagaggcctgtgtctccccacccgcgagagacataactgactgggctctggctgactgtgcctgtacattggtttggggtttattttaagcagaaggtgcagtcagagagcaccaattgcaatttggctgtgtttctgcacctccagaggcaccgttcacacaccgttcatggcgtccctggaggtgagcagcctggcattggcgtgaggacactgtttcttccctcttgaagcctctgtgtcttcatttgtaaaataaagatattgcgctttatctcttgggttccttccagaaatgaagttctgggagaaataatttgccagaaataatgcaattctttcggaaagaaaattgggaatgtcattagtaagaagagaaagggatttgattaaaactaaaatgcaggaagagtatacgtgggtttgtttcctagagcctacagagttctctatggctgagctttgatccttcagagcgcgcctcaagcccattgtgtaagagatgcactcaccatgctgtggtttttatcggccaacgacatatgcccggtgtctgggtggctgctctggagaatacacgttgcactggtagttattcaatggttatttgagccgcgaagtagattaaatggagggcgaggagaggagaaacggcgccggtgttatgctcagctgtgtgacaggcgggcggactgagtgtgacctgcctggaggttggattggggcagtgtgtccaactttacgctgcttccacctgtcatgtgtgaagccagacgacccacacctgttttcctctccaggggacttttcatcctctacaaggatggggatgttgacagtcctgtggtccgtgaacggatctggcaaaacagtgatttcaacttcgacaacgtcctctctgctatgatggcgctcttcacagtctccacgtttgagggctggcctgcgtaagtacagggagcacacagtcttctggagaggcacctgcgtgcccagggctgagccctccctcctggagtcagtcccatttctgttctccagtgtcgcaggattgccctgtggctttttaaccttgggccacttctcagtcacttcttgacccacagggcctctttctgtgtaggtggatgatttgtgaagcagggttggtagaggtgcctggcagcatctctgggtggaagcagggaggcctgagatgcctcagtcccgtgaactcccattggatgtcaggaaagctgccatccgctgctcccaaagagggtctgaatggtgtcccaaaccattcattcattcattcattcattcattcattctaatatattcccagttgcggacagttgctgttatgccatctcttttactgagcacctgctcgctcatttacagaccatgctgtgcagaggcttgtgtctccccacccgttagaaatgtctaactgggctctggctgactgcgtgcttagataccagctctgtgcaacatggcatgttaggcactgtggaggaaacagtgtctaaacatgcttcctctcctcaagcccaaatcaaatcagtgtcaagtggtcaaaccaggcaggtggtctggtgtgtcctagatgtgcagaacagggtcctgaagaatggctaagatgttgatgggtaaagtaagaagagcaggtaaggagaagttagaatttgaaagggagaatcctctgtgctttcgtgttgctctttgcttctggagctcccacccccagctcctgccatcagtgtgcaaacacacctagagtcctggatacccggtccccatgcatagatgagctgcaggaggtgggcaggctggggctcgcaggccagcagagttcttggggtgtgtgtaagagtcagatattttcaggagctcctgtaggataaagagacagtcaggtggggcttgttcattagggatttaatcctgggagaacagaggcatggagtaaggcccttcactgtgtgcaggcacaggctatagtgtcaggctttgaacactgtacttgagcaaatcatggtggcagctgaggagaaaggagcaaacctgggactcggggcttggaggaactggctcaactcctggctctgcccccaaggagtgtgactgtggcactttgatacctccctgaatattcctatgatggggatgatagtaatgtctgccttcccagatggatgtgaggattaagggagaggctgtgaaagtgtctcgggaagcctatgcatgggctgggtgccccagaagtgttgaatctgcatcagaatggggatcaatggaccccaagggtgttacagtaatccccctcttcctgttaagagttccgctaggcatagctttaattttagtgcatatctctgtttggggaagcacccttagttctttggaactactctggttggtcacttactgtcttgccagtgtgcatagttttcacttcctccagtgtcttacacgtgatattcttcctctctgaatagaaaggagtgttttaggatatttgtgaaatcttttgattttcagttcctcagaacagtccctcgatgatgatatcctgggtgccccctcctcttagtgctggctgtttgggcctgaggctgatgggagagacctggttgtgtccagcagccttggggtgggttcccagcgagtgctcatgagaggagttctggagagggaggacctgggaaggcagcgggctgggccgtgtgggctggggggcttggcaggtcctcacttggtttttctctctctaggttgctgtataaagccatcgactcgaatggagagaacatcggcccaatctacaaccaccgcgtggagatctccatcttcttcatcatctacatcatcattgtagctttcttcatgatgaacatctttgtgggctttgtcatcgttacatttcaggaacaaggagaaaaagagtataagaactgtgagctggacaaaaatcaggttaaagtcacacactgttttggcttctgtcccttggtcaggagcggagtgccttctttattgactgatttcccccatacccagagaagggcacccacatactgtctgtccctggggctagggccctgttctaagcacaccctcagcccatttgagtcatcactgctgagcgttaggtttcccgatacatatgagactttgtaattatgaaatccatcgccagacctggtggtatgaaatcagagagtgcttacgccacctgccatggtcatgacccactagtgatggctcagaatcttagttggggtgctgtggccactcacacagacattcacagtccctactgggagatggtctttaaagccacttagggcagtttcttacccttggtgctattagcatttcagtctgggatgattcttggttgtgtttcctgggctttttaggctgtttagcagcatccgtggcttccagctgttagatgccaatggttcgtcttcccctggtagcagtaaccaaaatgtctccagacattgccaagtgtcctttggggggcaaagctgccccttgttgagaactgctgaccgaggggggaataccctgcatcaccccagggaagtcagtaactttgaatttgggactaagattgtattggcatcattcttgatctgacaccgtgttttagccagtctggtagaagtaggagccttttgctcgggtgacgtggtgaggagagggagccctgtgctctgggctatcttcctacacctgcactgtgaccctaggtgccctctgatccctgctggggcttgatccctcatctctaaatcgagggcattaaggagctgctctttagagattccttgcagccctgaaagagtctacaagatcgagattcttttctgggagtttccccgggtcctctatcagtagcatctctgttttgatgacgacgtcgcaagcaagaatgatctggtagcctaggcttcctcagaggaagtggcccgggcacggcaagccaaccatagctggctgtacccactgggaaatgtgagaacatgccggtttgtgtttgcaggaagattttcctttgagttgtcagggtgtccctgtagactccaccagtgattgtcagggagaggtctggcccagcaatttgctcacccaaggaagaggagtgtcagagcaaggccaggccagccacgcagagccagcgctgaaagtgtgtcagcctctgaggtccagcacaggcttgaattgggggtccctggagtgagcatgtgaggtcagagcagcgccgggtcccagacactgggaacctgtccgaagcctgcacccagagtcaaagcaggagagcgggggtaggtctaggctctcaatgctgagctgagggctcttggggctagaggttccctctgggcctgctgcagagggtggaccagccccactacccagagtaagtgagaaagtgctccagctgggtcccaacctgtgttcaatccaattgtcactacagtgctccagctgggccctaaactgcgtccaatcaatccagctgtcgctacagtgctccagctgggccccaacctgtgttcaatccagctgtcactactgaccacatcctagggattctgaaatgaacacaacaagctccccagcccagaagctccccgatggacatgtggatagctccccataagatgtgtattgttaacacactctggctcctgaagggtatctcatgtggttccaactgggagcatccaggaggctactagtcttggggaatgagccagcccctctcgttcttgtgagtttctgtggttacttggcctcctttcctggaggacagcacaggcaggggaactataggtgtgatccacctatagatcccccgtatgtgtgataaagaggaaaggcagtgataaggcctggacccagtcctcactcctgcttgtgtatacactgcagggcctcaggaaagacagctaaaagctctgagcctcagtttttagtaagcaaaatggaagccacatgggtaggtacccagcttacccggagcttgctgggagggtcagcgaaggtaatggaggcagggccctcggtgactcaagagtggtgccagcagcaggaagggggtcactcgtaatcattttcaccatcgtccacggccccttcccgggagctgtagggtgagctctttcagagcagatgaccacggggtcctccttccctgcaagtgctcagaaccccgtttctgcccttttctgctgttgcagcgtcagtgtgttgaatacgccttgaaagcacgtcccttgcggagatacatccccaaaaacccctaccagtacaagttctggtacgtggtgaactcttcgcctttcgaatacatgatgtttgtcctcatcatgctcaacacactctgcttggccatgcaggtaaaaatggagacagccgtggggatcaggtccgggcattccgcacagccccgtgccccaaatgctgagggtggaatgctgcccctcacaggaggggtttgatttttctgatgagtctgggctataggttggccagagttctgttctggctgacagttgtcacggtaggagtttaagatagttcttttgttgaagaaattatccgtacagcatgatggtaggtaacatttccatggagcctggcattggtgctcaattctgtaaacatttaccatgggcctcctgtggccagctagtggttgagaactacagctctggagatacacagctgtttcaatcctgattttactctgaattttttgtgacttggggaaagttgtttaaattccccgaggcttgatttctttatcagtaaaatggggaaatctgtcacacctacgttagagataaggtttatgctgtagataattcccctcagacactttgttttttattttttgccttttgtttttgaggcagtctcactctgtagcccaggctggagtgcagtagcgcgatctcggctcactgcaacctccgcctcctgggttcaagtgattctcatgcctcagcattctgagtagctacgattacaggcatatgccaccatgcccagctaattttgtatttttagtagagacagggtttcaccacgttggccaggctggtcccgaactcgtgacctcaggtgatccgttgcctcagcctcccaaagtgctggtattacaggcgtgagccaccgcgcccggcacctttggacactttgatctgggcctgtcacagagtaacactcaatgttggaaaacaaaacataagtcacactcctgtcctcaggtggctctcagcatggcagtagggaattttccagttgatgaagtgttgagtttgacctgagttacagctacttcttattccagtgggggcaagaaatgcaattgagtttaattggccaagtcagattatagtatggtattaacagcgaatgttttcaaaagttacattgcctagtagatactctacgaggacaggaagcaaagaccaaggtctagagccagcttttgcactgactttaagaactccagcacatcaaaccagctctcagtgctgtctggacagtaggtctaaagatagggataaattttctggcatttttcttaacctaagagttctttttgaatgaaaaggactgtgtgctgacgtagaagaaagtgtaaaatcaagaaaacactgccttttattcaacataaacttacatggcataaaatttatccctaaccaaattctacctctattcatagacattttggtggtatctgcattgtgctctggtcaaggccctcaacataaagccctgccagaagaaagggtgaattccctttatcctgagcagaggaaatggatatgttttcccccttcatcattcaatcatcctcatcttgtcacagaccctcctgcactttgtgggagttcaccacatgaccttgcaatgccggtggaattgcccagcgagggtgctgggctgtggaggatgcccacaggggcacagagggctgggagcctccatgtgcaagcatgtgagatcgtggctgaggctctgagaacggtccctctgtcttcatccatagcactacgagcagtccaagatgttcaatgatgccatggacattctgaacatggtcttcaccggggtgttcaccgtcgagatggttttgaaagtcatcgcatttaagcctaaggtgagttgcagaacccacttttcaaaggttgttgctgagtcaccctagagaagtacccgcttcctgttagtcttgtgttactgaattatgctaaagtgttctggccgctaactgggttaccacctgagaacattaaaatctgattagagcatgtgtgtatatatgggaaaatgaatctgcaagaacaaaacctcatgaaaacaattctgagaaacagaagcagggagattagaattgggaatttgtaaactgcagattattttgaaagccagttttctgtttctagaatagtacatatcatgctgtgtcagggaaacctgcctcattacttgagcactagagaaaatgtttgaacataacccatcagaaagaatttgaccctgattatactttcagatatctagtctaaagactttgttttgtttgttcttggtctgcagcatcctttttaccctttaagggaagtgctgataccagctgcagacctctcacagccataccatcttttgtttgcttaatttagaaaaatttcacttgactttaacacaaaatgagacatgaaatgtgttcaactgtgctcgacgactcagcgtgttgtacccctttgggagggagtgaattcagttccccacttgtcagtggctgccagatgaggggcagtgtagttcagtgtcaaattgcatagttgtggaactggactggattcaaatctctactctggcacttacagctgaaacaagttcctttcttccctgcgcctcgacttcctcacccataaaatgaggacgctaatagtgctgtttcatggggttgtcatgaggagtaaagagttcccatatacgcactgcttaacagagtgcctggcatgtagcgccacgctgcggactgtcggccactgctgttcctacccgcaccaccaccctcatcatcatcaagcaaggatgttccctcattctaaaagcctagacagaagagccacaccaagctgaaatgtgggatatttggccctcattttctttcccagtacagccaaaaactctcagagttagagatgacagagttcagtgacccagttagttatctctgtgtaaggtatctgacgacactgatttaattaagttaggcatggattatgaaatggatggtttcacatactccatagttacatgaaattctaattccaaactgttcctttctttaatttgaattaatctctatgcaatctttatcagatctttgtggaccaaaaagaaaggacatttgtaagtgattaattggggtgattgcagtggggtcaaatttggcacctaatgcatggccagatgttattatctactgtgacttgtccatatctacatacataaacatttcctccttttccaaattcatcttaatttcctttgagattttggtttgcttccctctcacctttacttctttgaacaatatttgtctggactgatggaaaaggttgcaaagtaagaacatcgaaggtacttgagaaatgcaacatggaacctctctgtggaacatttcccagatacctgggccatgtcttcccttgccagatgattaagctctgaagtttttgaaagcttgctctaggctgaagagaaagcacactcacccatggtgtgtatgtgtgtgtgtcagtgtgtgtgtgtgcacatgcgtgtgtgttcatgtgtgtgcttgctcccttcagccggccagtgcattgacagcccagtagtgcactgcccagtaggctgacagttgcccagaagatctccaaacctgggaggagagttcagtagcgcgtgaacagataggcgataccaaagggaagtgagtagctaagctataatcagtactgatagatcggagtttttaaatggttgatttctgctggaaattgtactgcttgtagtttcactcagcaagatatcttcatagcattagacaacctcacgttacaattgggagaacttttaagacagtagcagcagcatctccacacttgaagagcactgtcactgcgttccccccggccaggggaggttgagtttatatcgtgtgccgggatgagtgggagagtatcggttcaccaagaagcaatgccctccttaaaatttttcctgccctttttttcttgctcttctctttggtgttcacaagcccagcccgagcaagtggtctttcacaaagaagccagggaggcctcctccctcctggtcggtggggtagtcgggctgaagaacaaggttgtcaaggctgcagaaggaggaatattctgaggagatggccacatgggacctcagcctcctctcaggagagcctttgtctcatgggaggagctttgtaacagggtccctcatggcagagttctccactgagtcaggtacaccttctagcaggactcgtcagtatctctgttaggggacacaggctggcagagtttcagttgcttcataaaataagtatagaaagtgaggtaagacaaaattcttactggtaggtgagaaggcatttcaagagggaacggttaaagaaagttgagaaatctgaccttaaggacttattttatataagggagcttgatggagaaactgggcctcctaagagagtatatttagagggaaatggcccaaggtcatgggagatgagatgacccagcctctgccaacccagagggaggtgggaagtagacagagggagaaaactccgagctggaagcctccatgatggaagaggccatctcacctcaggggaggaggcattttggagcactggtcaggcaagagtggaaggtagttaggagccgaagcgcaaaagcatccgggaaaagcaagcaggtgatttagccgattgtgggttcccgaagggaaagttcaccagctgggtgttgacctggtgcagcctaggtcctgctttcaacttggggtcaactagacctctgtagggttttcaaaagcaggccctagtttaggtgacacaagccccattctccaagcctttccctccagctgctagaattctccaacaagttctcttgctccaaggaggaagattgattaagaagggcctttttcaaagtgctggctgcagcaggtatagagagcacttctgtggagtaagaagagcctggtctgtctgggattctctttgtgggatgttacccatctggcgttttgtccaggctgcattctaggccatgttgtttgctgcggttactggccttctccagtgagccatacttcgttcccatcttagtcctttaaagtgttttgatcttgattctaccctgaaaatatactaatttatactcctagctacttgggctggaaaaagtaaggagaaattaggtttggggaaagaagaaagtgttttggtgctgtcctcatgctgctgtgcagagctgatgcagaatgggcactgagtcctcatctgccttcaagggctctgttcgctgctccagggtcccttgcaagagtagagcttcttcatgatcttcctagagtaccttttccacctgctggagagaaaatttgacactgtttttttttcagttcttcatgaccccatctgttctagatttacttttaatggcaaataatacttgaaaccaagtattactgtccttagaactttacattgggcttcttgttgggctccatcctgtccttttgacattgaggtttcccagagccctctcctggtccccttcttgcctggtaagatgcatacatgccagagcgtcagtggccgcctctgtggcatgcagacctgcactgcccttctctctcctgagcttctatgcctccctgccttcaaaatgatctccctgcctctggcctcagcccttctacctactccctttgtaagcccaaagctgaccagaccactcttgcagtgatattttggcactggccacctattgcttgagaaagcatatacaattttcttagtcgaatattcaaagtcctccatgaagcactggcccctgtatatttctgcctcatttcctgccattccctccctgctatttcttcgtccccaccccatccccaagtgttggcatgctagacctttccctgcccatgcgcctctgtctagataccctgcttcctctttgttatccttgaaggcctgtgggaaatgttatcttctctgagacagcatcctcaccccagccagagccagccctgtcctctgctcatgcatccgttgggggcctactatgcaccatcgttaccaacactactccatgtctgcctctctgtttgttggtgagcagctgcttgaggtctcaggctgagtcttctgcttctggctctgtggtacctcacatgatgcctggtggtagcttcctggtggtagctcagtaagattggtggaatgaagaaaggaataaagggatgatcctggaagtgcagcctctgggcatgagacgatacctgcttttctgtcgcagggtatctgggtagagcagagtggagcacatcttcccttaattccccgcttacctttggaaaggcttttgctagttagaaagctgtcaggcatagtttctaccaaaagttggcactttgggttatcacttgggtcaaatgctacccaaataatccctgccagcatgggtaagagatctggctgccatgatcaatgacaaaaggcacattatttatataggcttctaccgatctgcagatgggagtgaatccaggcagcaaaaggaatctgaacttgggtcacttttcttgtttcccatttgcaaccgttccacaaacattgcccccttaccatgtgcaacgcctgtgccatatcctggcaagagggccaggaataagagatgtgccttccaggagcccactgtccagcaggagacaaacattgatggatggtgacaatagggttcttagacatagtggtgcttcctgaccctgaggcccacattagtctggtttatgattttaaatttccagagtcagaaatgtttctgcgcaatacatattgcatgtggctgacttgtttggtcttttcagacaggtagagctggacacaaaaataatatagatttgactgctggttccacttgagaggttctggcctcagaattcagttgtaggagaacacatcatcataggccaagaggagagagcagggagaggggccctctgttaggagccgtgtcatttcttgtatcttatcttctggttacaaaggcaatatggtgcctttggtgggagaagggtgggggaactgagtcatgccacttgacggtgattttattaaacaagaggctactaaatagggaaacagtatgtgggaagaatgggagggctgacattttctccctcccctggactcctgtcagagccacctggtcagagcctgtgatttcagccacctgccttctgcttcctagattaagggtgtcaaccttcagtccatcaatcattccaatttgggcacagttttatgagtgtgaggggtttctggagagagagtcaatgaaattgccaaaaaattccaagaccccaaggaaatattaagcccctattgtgttgatttaaacggattttatccatcacagtgcaccagcattgagaatatcttataggctgatggaaatggcctgaaggggagaacactgataattctggagagagggagagaggagctgttcaggaataaaatctcaaagtcagaggctggcctccagcacccatgtggtgggtttggcctttgggaaatgacataaataatggagagaagcggcgcacacggtacaaatgcaggcggggctggggcacgcaccacagcaggtgcgaagggcgaacgctgggtctcctccgccttgtcagtactctggaggtctagttgctacttgtgaccaagtttttgatcaaggtgtaaattccttcctagaggggaggggaaggatcactgtgctttctttagcttttgagttactcttaactccatgaagaaaagggcaggctctgcccctccaagtgtggtctgtggcactgccaccagtcagagaactgcttgttatccattcgcaacaagagctgtcagctctaacactaagcacattgattcagctggctttcttgttaggagacttcttggacgaaggaaactgctgtgttcccttacaacctgaggctagctcttgatctcacctctgactgctagtctagacctcaaaggcagcccatctctgctcagttttgccagccaagaatcatgaattcatgcaaaggaaagctagaaagcataagctgtgctgtttttaaaatagcccttcccattagacttttatacatagatcatcagatttggggctcacaaattccttttgtctgctgatagatgggccagggagggtagcagtcagtgagggtaaaatgggagagaggcactgtgatcatagggcggggagagaggtggagagttggttagaaaccacggcggttgggtgggggaatcttacattattaagattaaatttaagaagcaaacccgaagtcagtgtcgtagctcccccataaatgcacctagactgatggatggtgactagaataaacatccctactccagctgttaggacagtcagtacgtccacatcttctatactgtcgcaaaaggctgtggttctgcagtggcttcttctgggtctgtgtttgatcacaagtttctgggacctgacacctcaaagtactttttgttctggttttcttaatgcagcactaaatgtaccccgttgtaaacaggctgggccccattttatataatatgtacctgaattttcatttccaaaaagcgtccagactctttggaaaaacacagttggtttatagacagagctgttgatcttgacagtcagtccgttgcctctttggctgtctgtgcagtatctccccaccaccctctccaaccgggagcttcccaggggtgtcgagagaccacaggcactcatttagcacctgctgtgctgatgctggaagaagatgtaaaatgtccggcacatacatatagattttaagttacaattgtggggatgttgtaccctcaaaattgttgcaagatagcaggacctgaacaaacaaccagacaaagctggatgacaggcagggtgcaagttggtggacaaaggggacattgcacatgtcaagcactgactgggttcaaggctctggctagataatggggttagggaagttgggggactgaatatgcagcacagtcatcatccttcagggcttttgattggtagagctgcagacaaagaccccacattcagccatcagtacgtaagagattcagcgtcagcctgagggagtgcagacagccgggactgcgaaggttccatcagggaacatttatctgaccttgaagaagggtgaagttgaacagatggagttggggttaggcaattaggattgcagagacatcaggaggtggggaggaacctggtgctattttcgaaggatgggaaggactcctctcagcctagagggtgaaaagtgggagggaaagaaagcaaaagctgagatggaagaaggagcctattggcttctttgaaggacagagggagccctggaacatcctcttcattccatactcttttctactatagagcctgccttgacttccccacactaagcaccacccccatgacaaggagccagtgtctctgccacgacgctgtgcctcacggtgcctgtgtccccgtaagccattatctacccgtctgtgtcgtctacactgagagttctttgaagacagggacttgtctcagtcatcctgccacaaggcatggcctttgtaatacaggctggacttgcgaggactggagagcattgctggcccatttgaaggagcacagaaatggaaatgtgtgcaatacctggtgacagtgctctttaagtggggtgaatggagattctaaggaaggagtccatcagatcgtgagggtttgggatcatccctctgggtaccaggacaaggttgccaaaatgccttcctctgccctgtagatatcctgcttggtttggtgccactcaggaccgtgagtgtgtgtgtgtgtgtgtgtatgcacacgtgcgtgtgtgcgtgggcgtgcaccttctctcacacataaaggtgcacaaccaccctgctgtgcccctttccaccagtggacagtattgttacttcccctttggctttcccaccctacctgggtgccatgggtgcggcagggactcggattcgcccctatacggtccgtgtggtgggtcattcatacatgctcataaacatctgccctcgcctgctctgtccaggggtattttagtgacgcctggaacacgtttgactccctcatcgtaatcggcagcattatagacgtggccctcagcgaagcagacgtgagtatgcacctggcgtggccgccacctgtgtcctctctcctctgtctgtgcatactccgctccctgccctgcagtggcatcacctggacaagtcacagatcccagtcacttgatctgaaactaggatttcctaatgagagctgtaggcaagacgtgtttcagggtagagccttatcccagggccttttgtagacacaaatcaccttttggaggacaggcctttttgcagcatttaccctggtcactagtaggcaaggtaagataggatgtctctaattgttttcatttgctgtgtcagaagtgatacccacagtggcgtatctataacatgtttattttagggggatgtttcaagtcgccgtgtggcgcgatgctagaatgttccccttttgtaacactgtccttttcttcttttttcctgtggtgcttcctctcctctgtggcttctgaatgcttgccctaacagcactatttcactgatgcatggaacacttttgatgccttaattgttgttggtagcgtcgttgatattgctataactgaagtgaatgtaagtagcaaactttgtgtcctatatcatggttgttttcattaagtctgacatagaagagactagaggccctgcccttaaatctccacacactttagaaatccagacacaaatttattttgaaagactaaggataatttgtagtttcctctatctcaccccatctctatctccttcccctgaaaaagagtggggaagtctatgtagaattgccttttggaactagaatagtatttcaaaagatctaattaaagttataagggctgggagttaattgtgtgtccgtgtgaatgttgtcactcaccagtcgtgtgaccgtggaagtcatccgagtgctatgtgcctcagtctttccagctgtacatggagttactgatgtgcaccctcgtccccgcaatggttctgtgagggcacaggcaggagaccccacagccagctatgccctgagcctgtggtggctgctgctggtgccctcacctgtaccgtgtctgctctgagtctgactggtgacactggtgaacgtcccacacccaaagggtgatgccagccagtggaaggctgcttggggccagggaaaagagggccgagtgcaaaccagggagagggtgtcagtccgcctttgttacatccagtagattcacttgagggggaacaagtgcagtagtggcattgtagatggagtgaaccactctccctagaagcactctgagcacctctccccctgcaaaattaagaagcgtgagaaagggagcccctccttctgcctggctccccttgggtctgacccatgctagaccggaaggcctcaggcaggcagaaagggccctgtctacctgatctgttcccagttcatcagcaagtcttagtgggcgtccagtgtgtgtgccgagcctgtgcagagcctttcgagagagtgggcggagcacggggagggactgttgtgtggtattggcttttgctccacaatgtccagcccaccccctgcccctgatgctctgcctggtgacatctgcaggattgaggattataaggtccatcctggtgcccagacagcctgcatcacacaaggactgtgaaatccctgtatgccacctatctgggtccatgctgatcctggcgtgtgaatagtaagacagccaccagcctggcagtcctaagacctggcagttgcagccctagttccaaactgacttggattccagctccctcatgggccaagtggggtgaataacatctgcccccttgctgcagatatgttatagtgataaaatgatcggaatattcgggaaaatgcttgctaaaaaccccaaagttttagggagatacaagttttgtattattctaagtgtagattttccctgtaataagtaaaacagactgtcagacgtgactgtgcccatgagggtgtgatttaagcctcgtcatgccacgctatgaccaggcactcagatggtattttgctagacctaggtatacacatattccaacttctaaagcccagacatgtaaattctacttcatgtgaaatgttccatgtgtcagctataaaattgccattcagatatgtaaatgatgcttggttgtaaaataagctggtgctaatgggagaacagcaggtccctaactgggctgccctgagctctctccgaagtttatggctagacatctgccaccttaatcatctcacaacgcaaagtgcttacaatctactcggaggtatatttacatgaaaattctggaacatacccttctgtgagccagagatggcctataatggaagcgaaaatacaataaaccagcagcagggcagatctccctggactgctcagcacttcaagtgctgtgcaggtggtgggtgtaaacacttagcttccgggcaccaggatgtggccaaggtctgtccacctggggacacccagctttctcacgcctgacctgcctgctggctggcaggggtgtagcacccatgtactcagggacagcacgcgcccggcttcctggctgcctcacgtgtgctgcaggctggccctgctcctcccgctgcccctgtcccctgtggcccagctttgctcatcagtgtatcagtgttgctgtgttcaccttgcaccagtcaggaaaggggcaggtctacgctgaagtttctagttagcatttgacattggggtatctgtgcaacacaggctttcagggggccccttcttggcatgcaattaaactttcaaaatcacctaggcagacactcccatagtgtgctttcagtcagtgacctttttcctggtcagctgtggcctgagaccagatatattcctcagccatggcaatgccagttccctaccccaggccagcagaacaccaccttcagaaatctcagtgtctccttgctgggccttggaacagaggggatgctcaaggccaccttcacatttattccatctttcaacacacattcactgggcatctatcacttacaggctctgggctaggctgtggggaggcacaaagataaaaaaggactgggtgtccttaacctctggtgtaaatacatgacagtgggactgttggttctgacaccccactcccctccacatgtagttcccctggggagcagtgcacatcacatccttggtggccttgtcccctgagctgaggggtcagctgtcagctgggtgtgaacacctttggttcatcattggctggttgtagctgccataagtcatcattgtttgcaatgtttaacctgccatgctctcttccccaaactctgttgatctttcttttctgttgcctaattgattttcatgttggttttatttttagaaaattgtagcggcaagtatatataagcatatatacggtgaagtccttaaagcaaagcacttctaaagaatgtgtgcttgtttttggcctctccacctttggttttcactgcgctccacaggacgtgctaaggattggttgcaatcatctaaattgttccccatcccatagattgtcatctccagcctggggccatcttggtcagtcacacttggctctgtgacttgccaacatagtcttccagaatgaatgatctggctgagaaatgattgaattcagcctgcgtttgtattctttgcaaaaacgttttgggtagtcctttgcatggtcctgcctgcgcacgcaccagcctgcttcatcctactgtccccctcccatgtccccacaccccgctcagttcctggtttggcagcactcatggacttatctccatcacatttggtcctaacctcaccaggctgctaaaatgacacactgtgactgctgggctccctcttgctccgtccctctttgatgcctgtttgttccttgaatgatgaaatgacccagcaacatactgtccctaacccatggatggctgtcactgacatttgtctcttctcattatcattagtgtctgggaggcaaaacacttgtttagaagctgtatctgccttattattacttactttgaaggagcaggtaaaaagtcattagggagctcactctcagagatccaggaatggtccctgccttttaaggtatgctgtttggaccaggtggctgacagtctcactcatcttctttttctgaccccacagtaaggttgtgtagtcccccatttcatatgtgaaccctttcccaggagccagctcagctgggcactgggttgtggacacagacccagcaaccccaaataaagaagccctcctcccagaggtgttacctgtgagctcagaaatagtcagagggaagactggcttctccgcaatgcctcgggttacctggcccagctgttctgggatgctggtttgcttcctatctgaattagaaagctgcatcctctcagctcttccaagcacagatagaaattaaaacagaaaatgaaatggactgatttcattgatttcacttgggaacctcagggtctttttgacttccacggttgcagggggctgccccagagcctatgtggtaagagcctgcttgagagccctgtgggaagaggctcgagggaacatcagcagagccccaggaatctaaggagctttctggaccctgacatgtagtccggcctcctgaggctaaggggctgtctcctgtagggttcccagctgaagaatgtgacatcttagggtgggaaggaactgccaagtttgtcttgtccaagccctgaggtgacactggaattccgcttattgaaaactgattagtagccccttgtggccatgtttggaaagctacctagtgaagagtccttccccagtctggtgtcctctaggggtgtccagcatagcgtagcccacttgcgttccagctccaccagttcccttcatgttgaaacctcctccatcccttgtaggggagatggggatggagtctaatcgctctctcttcatccgtgtactgttccctcgtcaacccagaaagaacccactgttcagccacagcagcctgagtgggcttttctagtgaccccactctgtatggccgctcgagatctaaagggcattagctggtataggccacctgttaactactcgggccagctttaccctggcccaggactggagttctcagctctggcagcatatttgaatcaccaaggagcttttaaaattcccaacatggaggtctggcgcagtggctcatgcctgtaatcccagcactttgggaggccgagataggcagatcacctgaggtcaggagttggagaccagtctggccaacatggtgaaacctcatctctactgaaaatacaaaaaattcggcaggcatggtggcgggcgcctgttatcccagctactcaggaggctgaggcagaagaattgctgatatcctgtaggcagaggttgcagtgagccaagatcatgccactgcactccagcctgggtgacagagggagactctatctcaaaaaaaaaaaaaaaacaacaaaataaaattcccaacatgcagatacgccccagatccattaagtaagaatccctggggtgggacctgggcttcagagattttgttaaagatccccaggtggttttagtgttcaggctagtatgagagctggcctccccttttcattgggctgacatttgtcatttgggaaaagccatcctcagggttctttaaatttgtaagatattttggcaacttgcactgtccccccggggctgccagtcacatcctcccctgaagcagccccccatgcccagtggtgtgtggtgggaggggaggtgtcgcaggcgcactgagggtgcatgaagcctggtgtgctgtttgctctttccttcctccctccctcgcatgttgtgctgccctctccctttacaaatgctgtctcctcttcccttttgttcttttaaacagaatattcatggtttgaagttcatagtccataggttgtcagtttcaaagatatcagttgaagagatgtacacttcgaaattcagttcggttgctgactttcacaaactctaaggaagggggccgtggatggcgtatcagacttgaagcagaatagggagaggcccgcaggagggtcttaggccagactgtggccaggagtgtcttccctgaccaacaggccccttactgtcttgcaggtctgatacataagttgtgcacatttcagaaggataactgtagagccgtctctctcgtgcacactgcctggtcccctgaacacaggcaagcagaggtgcacatgcgggcacacttagcatgcacactcacaccccacactccagccagagagggaagagtggaaccttcctgtgcacagccttagtgagaatgatgtggaaaatgatgagaactttaaaaaattagttccttcatttgttaaggtcttaagttgaaaaacattgtctgtccctttaaggagctgatatttcttttgagacgaactaatagaagagggaaataaaaatagcaatcctgggtttttgataaacctgtggcagagttcccattctgagcatcccaggagaagcaaggaccccttttaaactctgtcagaacctgttcctcttgggttcattgtcacattactgaatttcagtttttctgtgatatgctgaaaccccttattttctgtgaactttgtagaatttccctttggtctcaggaggtagcccttgatgctagagaggcttcagaactgagctctacctttccccagatccccagggaggaggccctcgagaagtgagcacatccagacgtgcacacatgtcccttaactttgcagacacactgtacagaaagcgtccttgaagcccctaaccggaagagcctcatttctctctgtcggctcctggtgacaccactgaggggaaaagagaggctggcacatgctggctctggttccgctgactgttgctgtttaatgtaaagatgcctcctggtgctggctggagtttgcttccaactcctctgtgttctctcagacactttctgaacactcaggtagtgctaggcaccatgctgggcacggagtggagtgaggcaaggcccctgccctccctggggtgggggttggggggcaggtaagcaccagtcattacagattctgcatcctggggccgagggacaggagcacagccagaccctggaggaggtggagctgctgaaccacaggggagctggtcctccactgtttcttccaaagactcatacggacctgcactccctcttatgtgaaagctgtctgagctgtggggcaggcagcgagggtttctgtagggaagcctgcctctctcctcctcgccctgactcagtctgtccagcttttcagcagccctgcctaagaggctgttgtcagacatacaccacccaggcgtttagtctcataggaacagagtgtggtccaagggggtttgtggcccgcaggcaggcaccactgcttgcccctctgctagagacattctgttcctcggggctaggaggcctgctgcagagcggttagttcctgagacccacagccctgactaagccaagagaactagcctcctcgcgagaagcgggggcacactctgcatctgttgaggtcttgcagcactgcctttactggatgcctgtcagcctgggcacagcatgtccccagatgtgaattagaaagtggtactgtgtccatgcccatgtccatggctgcctgccctcaagtccacctccaaggagagccactggtattttctcagggagggagcaggtgtggtgtctaaagatgggaaccacacatttttttaaagggggaaatgctctctggaaccattgactccttcctggttcattaatccattttcaatctttgatttcttaaagccaactgaaagtgaaaatgtccctgtcccaactgctacacctggggtaagatcagtgactagtccccaggggctgggccttttccttaagtttatttgaccatgtcgagttttccactggtttttctgtattctccatgattgtccttccagaacagtgtctgcagtggtttgcattcatcatcagtgtccagtactcttgaccagcccagcgttctcctctaacacagtagaatacgtggacatgcatgtgctgtgtggacgcagttttccgagctctgtgttgttagcatgtaactcttcctttcatatcatgctttttaagatgaaaaggccctagaatcacatcttcagttcttacctctgtcacctttgcatctgttgctgtttttctgaaagtgttgcatgttctactttccattgggtttgacctctccatgataacccttcagaactctgaagagagcaatagaatctccatcacctttttccgtcttttccgagtgatgcgattggtgaagcttctcagcaggggggaaggcatccggacattgctgtggacttttattaagtcctttcaggtaagagccatgccaaggacttctctctttgtctttgaagatcatatgtaagtcagtgattgtccccatcctagaggacccaggctccccctgtgtggccactctgtggacctaaatcaatagaaaacatggaatgctggagagacccaaatcagcatttcttgggtcaatcacatgggattacttgcctaaaggaaacagaagagaaagcaggaaggatccgtagctgagagatctgtagcatttccaagactgagagaggtgtggggcctgcagccctgcagtgcccccgggatgcctggtggtggtggtgagtgccaggtcccagcagactgcctggaagcccaacagcctctctctgacaccttttcctcataaggctacaacagtgctgtgtctgttggctagtctagatacaaatcagaaaccaccacctgggccagtgcactatcactgggttatcctgcacctggaagggtcacagagttcgggatgtttgggcatacaccatgtctcatttgtcacctctgattctccaggctggcacagctcggttctagactttcccaagtagaaccagcttttcccgtacctgccagtaccctgccccagacattctagccttctggactgattccatttggaagagaaggtgtgggaaatatagattcttagtaaaaggtggacccatgtagggaatttgtggatatctacaagcattagaaagtgaatcctgcatcttcattttttaaattatttgactatttttcattcaaaagttataaatgtttacaataacaaatgaagctgtccaaaggtatataaagagaaatttcaaacttggccctcacccacccctggggtaaccagtgttaccctcccagtaagcatttgtccctagtagatgggattttcacaggtaaaagggagaagggacagcaagcggggtggtgcaggcactcacaagggaagtcacagatcctgctggggagaatgaggttggaggaaggtaaagtgggggcctcaggcaggtgagccttgaacttgctaaggcacagaatcctcgacagttattattcatttaaagtaccaaaacttgggaacaaactgctataaaaatagataattcagaggtaatgttatctcactttttaaagaaattcttaaagattcaatttgccacagataagaaagtcatgttccagagcagcagttcataaaagcagagaaactgtgcaaacaaaaatcgtaaacatttggcaatctaggaagaaaatgcacgtaggtatgttgaggaaagcctgaaacgaactctgtgggaccctgctgagcagtccagctgcagggagggccaggctggcaggcacaggtcaacagctggcacaggtctgaaggtggctgagcacctgtgagccactgactttctgacaagctctctcggatagtagagaaagcgggtgctttaagcatgtgttcccagaattaagcctaacactctgggcaccctgtgcaggtagacgtgttggtcacatgtgatgaggtaagacagcagttgacattcagtgaaaggacgggggatctgtcagacactcgtacttgtatttggtgtttatgaagggagccacacttggcgaccccccagctcactccttttcttccctggcccagccccccaacttagcagttctttcagaaggtgtacatcttaagagaggtattttgcatcctacagccacagccagaaagtggttcttcccctctgacccagtaattccactcctaagacttcaccttaaggaaatacttcagcagaagcaaggtggttttgcataaagatattcctttgcgacattatctacaataccgccccccaaaacatacccacaaaagaaagtggaagtactctaaatgtccagtgttctggaatggtttgatcaattataatttcaccccaaaaatccagtaatgaatttaaggattatgagagttacgtgtctgtgttgaaaatgtttagggttaggctacagggttaatgaccgtggaaagcacatcctgcctgtaatattgtaacactgggcgtgcatgtggatggtgtcttcaggactaaagtagttgggcagggctgggatttaaacggttcttcctcactgtcgatattctttcacggtaacacgtggaatagaaaggaagcatgtggccactcatgggtcttctcaggctgtggcgggccgtcacggggacagccggctggtgctgagccaagtgccttttctctcccaggcgctcccgtatgtggccctcctcatagccatgctgttcttcatctatgcggtcattggcatgcaggtaagctccagccatctcgccctcaggggccctttcactgggtagccccaaatctgtggcaagatgtaccctgaccaagtgaagtagaagcattgtgatttttcagccaaatgcctctgctgaagcctaggaagatgagaaagacaaagctgcttagtagagagctccaggggaggcccaggctcagatgaatgtggagaggttagaatgcaccaggaaaaactgcatgtcatggcagaagaattatgctttatcataacaaagtgaaattcacttgaaactaactatttccagatgccaagactgaagagagaagcaagtagcccctcgtgggtcttttcagtctgtgccgagccgtcgcgggaacagaaggctggtgctgagccaagtgccttttgtgaccattgttgtgctttagtagctcacctttaaaaagaggcatgaaactgggctcttctgtgacccaagcagaggggctgcaccctgtttcccagttcctcctgggcatgggaaagggactgggcctgcctaacagaggagccctaacatcaagtgggcagtgggatgggttgtgggtggagggaggcagcctagtctaagaatggaggcagtcgaagagcccaggtggctgtagatctctgctggcaggctccttgcagattctccacgtgtgcaggtgctgtctttcaggtaaaggagggatgtaagtcagaaagaagtaaagtgattctatgatttttggggcagagaaatggtagtgcttttttcttttttcttttttttttttaaaatcctgaaagcatagaagcatttgcagatctctgggaatcttaccaggagttatgaaacaaaagtcagcatacttgagcctctgtgattcagcagcacgtggtgctatgtgccctggaaggtcttttatcacatatgttctcataaaaaaaagccatctcagaactgcaagctgcatggcacacacaaccccagattcacccagcaggcgtttgtaagcatctgcaggtttctctagaatgtcagtctgctccctaaatctcacaagtaaaactctttagtaccttcccattgccctgaagataaagcccactcttctgcccggggctcacagcccctgcctgttgcctcctgcccttgtctccagcctggtcttttatctgtctgctcatcacacgttattttcattccctcggtatctatgctgtcaccctgctcctatgcacatggtgctccctccacccgaaacactcttcgcctttcctatcacctgatgtatctttcagttctgagtttacatgtcacttccccctagaggccttccctgacccagccccccagccttcagtagatgagcctgtctcacgcttccctgtgtgtctggaccaccccagcatcatcactggggtttgatgttgcctggctacctttgtgtctcccccaggggagatccgcgaatgtgagaccgtgcccctctggagcaccacgttcccagtgtgtaacctgctgcctggcacatggttgtgcctggcagatcttttttgaatgagtgaagtgccaggtaccatgagaaaaccctagctggtaaagatcaaacctgagttagttctaaattcacatacggattttttttgcatgacgaaatctattctctttttcctgacaacttctccacctagatgtttgggaaagttgccatgagagataacaaccagatcaataggaacaataacttccagacgtttccccaggcggtgctgctgctcttcaggtgactgcaactggcttgggcggtgctcctgggcaggggggtccgctaggcgtgggtccagagggacggaggacacaggttattaaagcagtgtgcctttctcagttgattgtgatggctttttgtttttgtttgttctgtattcttaaacacagaccctagcatttcaaacacaggaattttgctggattgttaaaactgctgtggtaatcccgattgtggctggcataaggtttattcatttgggagttagtagggctacttaggccacctgaaaaattgtaggatgtacgtttatgcatggaggcatgcacttgaacacgaccaggaagacagaaacttagcaaaaacgtcaaggccttttgcacagccagtggggaacatcctaagatgtatgatttcaaattttttgggattgcttttaacgtcagttaattaactttgtaaaacaagctgccctcatagtgagaaaactttctagagatcatgaagtatttctaatgactctagtgactgacaagtcatttgcaagttaggtggtttccagctctgccttcaacaaaattgaacagagacttaagttgttaagtattttggtcattaaaaataatcaataggccaggtgcagtggctcacgcctgtaatcccagcactttgggaagctgaggtgggtggatcgcttgagcccaggagttcgagaccagcccaggcaacatggcaaaaccttgactctactaaaaatacaaaaattagccaggtgtggtggcaactgcctgtagtcctagctactggggaggctgagcccaggaggtcgaggctgcagtgagccaagatcacaccactgcactccagcctgggcaacagagcaaaaccttgtctcaaataataataataattaattactgttaattatacaaatgtttaaagtagagaagacacaaaaacaagcatccatttatatgcagacagttagcgcgcttgcatcagatgatggctgtaaatccaagggaattgcagcaggacctccagttactgtgataagttgcacgtgaaaatcagtaggaatttcacatttccattaattcaaattggattttcttcaaatgacttaggttttgctctaattatgagtttttctcccctaagatctaagcttcaaattccttctttcccccactaaagcccctttgttcttcatctgaaaaaggtgtgcaacaggtgaggcctggcaggagatcatgctggcctgtctcccagggaagctctgtgaccctgagtcagattacaaccccggggaggagtatacatgtgggagcaactttgccattgtctatttcatcagtttttacatgctctgtgcatttctggtaagtgagcaacacagctccccctctcaatttacagatgcttatgtagcagtcagcgttcacacaaatggccttgccctgtcccatcgcctgaggacaattgatgtggatgagcactctggactccacttggcagttgagggcttttgtttaaccaggcgtgtgtcactgccgccacctttgtaagcagagatttggtgctcactaatcggcttggagcaattaccaatcaccttagcttcttagggttcctttctaaaatttcaaagccagtgcatatggtggtgacctaagagtgtgaattatttggtgataatgaaattataaaactgcaatgtgtttcagaaggccttccttccccaggacttaattaaagccattccagaaagctagaatcacactcttttcttaaacattctccaaatagaaagtttttacaacttctcttggagacatgggttcccatgtttcatgtccatgtcattagaaagcctgtgctcagttctaacgcaatccagctgcagctgaagttcttcctttcctatttgctttttcagatcatcaatctgtttgtggctgtcatcatggataatttcgactatctgacccgggactggtctattttggggcctcaccatttagatgaattcaaaagaatatggtcagaatatgaccctgaggcaaagtaggttgaaaaatatttgatttggcgtgtgtgggtggattttggaatgtcagctttttttgtggagtggactgaaagttcgggccagctggtactgttcctggaccttagattgtattttacttccaggggaaggataaaacaccttgatgtggtcactctgcttcgacgcatccagcctcccctggggtttgggaagttatgtccacacagggtagcgtgcaaggtgagtgtcctgtgtgcgtgtctgacagcctgtcttgtagaagcttgcttcatttaacaaacacttgttaagtgacacagccaggccttctgtcagttgctagggatgcagcaatgaataatatgtggttcctacctctggggaaatctcagatttgtaactctttggacaccctctcaggaaccatcagaagaggaagggaattctgtaatttgtcattgggtggatggtagagaaggcgacatttcagtccggtccagaaggaacacaggagtttgtcagaggcagggagggctcagaaggaggcaggagaatggacatcgtaatggcaaagggtgagccattgggtcatcctttggctaggacataagaggaagtcagaaggccccaggtacaagctgagccttctctgtcctgctgaggtccaggagaatggggaggaaacgtgaatttcaggttcccatgttaggaagttggctgttggcaatggagaagtagacctgaggcagggggatcaaccaggagagccagaacgaaggcagcagaagtgggaagagataggagcagtcgcttggagatccacttaggatgtggagtggggaggacttggtggcctgggtgaggggagggggagtgctaggagagcacatctcccagcctcggcattgggggacatggtgctctgtgttccacacgtcccctctgctacagagctttgtggccaccacaggaaatggggcccctttgctggcacactaggctctagtctctcagggatggatgcagatctcccagtgcaacgcagttctgtgtttccatgccagagcacgctctcaggaaccctcagtgagacttttccttccacagaactcacggtgtagcaccttacatttgttgcagcgacaaaaaagattttcctttttcaaggaaaacgcaaggtttgcctcttgaaactctgccttctagaaattcatacagtctgcatagcaactagttcttgctcctcatggatccaaggagatcctggggtcaggcgtttttaccactccaggatgctgagccagctctagacagaaaccaaggtagcagaacagagtctaaaatatgtttcagactctcaaagaaatcccttgagccagactcatgttccctgccctgaaaatccagaaagccttctaggcaaggccttagggtccttgcctctcttcaggccggactctggatattgaaacagagcttgacttttttttttccataaacttcccagtactggcctcttttctgctttccaagaacagtgtgggatcccgttcactgatgtcttcttgtgtttaaatttccagacccttttacataaagctttcaaatgtccttgaggcacagtcatccattttgctgactcaggaacttaccaggaaaagtgaacaaatgtccagggttccctggctgcctgtgctggttttgaagagggtgccggggttggtaggaggactaggaatttgggtgggatggacttatgcagacacaagattccaaatcatcaatatggaagagaaagaaaatcttttcttttggaacatgctgttaatgaaaaataagaagtttttaaatattatcaacatcaccattaatttagtgcttgccatttgcctcacacaaaactctttgtgtccgtgagtcctttaatccttgcaagttcccatccattgggcatgtcatctgcatttacaggttgaagtgactggggtccagagagggtgtacctcacccaaaccccctccaactctcattgctggtgttaaagggatcaggatatagaagaggagtggggagcatggatcctgctctgaaagaccaaagcctgggagaagccacataggctcatgcaaaatgccacaagatgtacatgatggtctaactaggcaaggtctgaaggacattccctgagttgggaatagtaatggatcccgtcggttgagaacctaagtcccaggccctgtgcctggcccattgtcttttacttcctttaaccctcacaacagctttaaaaacatgcttggagccgggcacggtggctcacacctgtaatcccaacattttgggaggccaaagcaggaggatcccttgaggccagaagttcaagaccaacctgggcaacaaagcgagacctcatctctaaaaaaacataacaaaacaaaaacaatgtgcctggaatggaggtctgaccctaagatctccattgagattagtgaaaaaaaggagaagactgtttgaacagtgaagtttcacggtttaaaaaacaaaacatcatctgcgtgttaacatttatatttcatgactaaacctttgatctttgtcatcccagagtcccctaagtggtaggttgtattaatcagggttctccagagaaacagagccaataggatggatatggaggtgtatatgtatgtatgtgtgtgtgtgtgtgtgtatttgtgtgtatatatgtgtatatgtatatacacacacacagaggtttatcatggggaattggctcacgtgatcatggaggctgggaagccccatggtctgccatctgcaagctggacctggtgttggtgtccactctgagtaaagtcctgagaaccaggggagcccatggtgtaagcctcagtcaaagggcaggagacaattgatgtcccagcttaatcaggcctatagagagagaattaaatcttcccccacctttttgttctctgtgggccctcatcaacagaatgaggcccacccacattggggagggcattgctttactcactctacccactctaccaattcacatgctaatctcatctggaaaaaccctcgcagacacacccagaaatcatgtttaaccaaattggcatctcgtggcccagtcaacttgacacctaaattaaccatcatatgcgtacccccaaatggctgttgaatggaattgagggttgactagaaaagagatgagtgataaacggaaaataaacatccaaaaggatatggtcgtggtcactcatttgcattctacaaagaaaccttcctttctgtttacagagattagttgccatgaacatgcctctcaacagtgacgggacagtcatgtttaatgcaaccctgtttgctttggttcgaacggctcttaagatcaagaccgaaggtgagcattccctgccagcaagacaagatggcaggaaaggagagagacatcacatcccatcttgccttcctcatctgggccttttcttggccaaggggaggccctggggaaggggctggcaagtagaatgaagatgtccatgctgggcttgccggctggcccctgcctcctgtttcctcatcctttatctccttcctttatgcttcactttgtcccagaatgttttgagttgactcatactactgcttactacatagcaagggaaacaggcagggtatcggagcagagacgaagccatcacaaatgaactcactccaaccatccctaactagttgtatgacctgcagtgagggatttcactggtctgagctgtagtttctttccctatgaaaaggaaatacggggatgtctaggaggtcctgaggatgaaatgaggtgatgtctgcaaaagctcctttgcagtgcctagcacacagtcagcacttgagaaatatagtgggatcagcatcttcccagctgagagaccaaaccagaatggccttcacagccatgctcagccctggtcaaatcctggtaaaacaggcactagagtgtggccattggagctggctcagtggtgacttcagaggtggaatggagagcagattgcaacaggctgaggagtgaccaggaggtggggggaggtgggaggtggagacctcaaggagagctgactctctgaggcactggtggaggagagggaagaggaggcagcaagggactcatgctgagtgcaggcaggtgacttcttacaaccctagagcccagggagacttgatccagcaaagccagcctcttccagcctaactaacaggggcgccttgtagcatgcttgtctgtacctggccccaggccagcattgttaagggctccagaaggcagaatggtcctctatactgacatgttagttgaaaagacaagtgtcagctcatataataaaaggccaaggttatgttgtatggatgagtacatatagtaggaattgagagtcttatttgggtgaaatttaggctggatcttcaaggaaggaggtacgatttggaacaacccatgaaagagcagaaggcaaagacattctgggttgggaacaatggaaagcaagtagtaggtctcagctgtgggagggcaggatggaatcagagtgggacaggccttgaatcccagggtgaaccgtgtttgttcccatggtggagggacttcccactgggaaggcatgatcgctattgctgaatataggaagtgtgtttgcccctgactggggagagcctggtgggagtggagccccatcagagggcagcatgttcatccaggtcaggctgggacaaggctgtgcaagcagaggaggagctggggaacagaaatgaggcttgcttttccccttttgttttttgaatccagggaacctggagcaagctaatgaagaacttcgggctgtgataaagaaaatttggaagaaaaccagcatgaaattacttgaccaagttgtccctccagctggtggtcagtgcagtctatttcctaagtagtccttggccagtgctttggttttaatgctagtgtctccagaaagtccagagagtgtttgcaaaatgctttatgtatcatttagagcattaaggccaactgataaagaaagccctttggccatttggtgtgattattttgggggtaatatgaagaacattccagacaaaggagaggcttcagtgaaaaaccaaaactcacatggctggagcagggattttctttttggtggaggaattaatgtttgaggacaagattgtgatctcaaagtgaaaagcctatattttttgtccaaaatgaaatattcaaaactagtttccaattacccttcagtatattgttgaaaatgtcccatgaaaaatagacagctttcaggaaattgtatttttgaaatgttcttatcaagactgaatttactaccgtaattaccaaaaatgtccttttaactaacaggcatgcttatttccttttgttatttatcacaaaataactaaccttctttaaatttttatatatataaaaaacatctatatatatacacacatacagtgtgtgtgtgtgtgtgtgtgtgtgtatatatatatatatatatatatatatatgcatactggctttgcatttttatttaagtacatgtggacttagacgttgagatggttgtttttgactgttctgtttccaagttttaaaggtgcaggatctgttcacccagtgccaccacaccagcattctagcatccttgggccgggcacgtgatgagcctttggtgtgtttcgtgaccagcgaacttttatagcgtcgctgccgccacggctttcgagactggtctggctcaggtctggtagctgacttcaggacccaggccaggacggtgaccgaggccctgcccctgagaaggtgatgagctctggctcttggggcgcagacagagcagcatgccagccagctctgctccttagcatgaagcgagaagcaacgtgagcttttgttgctgaaggggttacccgtagctggcacagccacaggctcaaagctggggaagatggcccagaaagaaatgataaaaggaagacaaaccaacaacaacaacaaaacaaaacaaaagtcctcccacctggagggccctggcttcccacaggagaaccgatactgcacatttaaaacaactccttggttttcattcttttctttttagctgcacacctaagagcttgcatggcttacatgaaatgctttggaaaaattgtaacaatgtgcttgagcttttcctgcagcctccattcctttcacctctcagtctttcagaatattctgaagcaattctgttttagggtggtggcatggaatcagagttatctcttgccaactgtattcccctacgttgtttctttaaatacagatgcatgcttcagaatagtgggctatgtctgtctatgtaaaccttccccctgcgagctgaggaccccgctcctccctcgctccacctcacatctctcttggaacgccaccttcatcacaaccagccagactcccacattgatgcccatcctcgtgaaatgccctcggagggtgtcatttgcattagtgtgaaacttcatttcttttcattttaccaaaagaaaagtccagaatttagctcgccatcgaagctcccttcctttgaaaagctgatcaacttttagctttatcagacttctagtagagtagaaatcttcttctttcttggtccaataactggacctcgccttttctctctatttcttaaaatggattggagtttaggatgacaggttttaatctattccacaacggcagcgagaggcagtgtgaggcacaagaagagagaagtggggccttaggagggatgcaaggctttgcaagctccctgcctgtgttgagtgatgtgcccagtgcagggcttatccgggctgaatctcatgtgagtgctgtggccacgaaggaagttccgaaggcagtggccatcaggctttggtgcatagactctggaagagttgccggacagggcttggttctccacattcatcatttgtctgtctttcctcttttatccttcagtaggcccatgtccccaacctttcctgcatcacagcatacttagaaaaggatatttgcatacccctctgggaacagatgtggagttcttgaggctgagggcctcagcatcccctacaccatcacctggtcaagaagcaggagactgagtaaggccagcctccactccaagtggctgggactggcagatgtggggtgctcaggaagccccttttagccctggtgatagaactgagtcagatgcttgtcttgggtggcttcgctagtgtgctgtgaggtgtggcctggctcctcatgagcctgatgatgagatcaggaatgagctgtggatctgtggatacatgtcaggcttgcttcactcccagtggcccgggggtctccgctgccccctcaccatcagtgctgagccgcctcatctctgcctctcagctcaggttctcacctctgctcttcagccttcccgtgccatcttgtgggtcctttcccttcatttcagaagctctctctcctccccaggactctcctccatccatgacctggatcctttgctcctttgccctgaagagcacactgagctgcctccattgccttcttttcagtccggagcccagatggcctccttgtattcattccttctcttccttcctgttctgtcctgctgtagctttgacttttcttgttcttaggaactcttccttgggcccagtctcctaattagcacagtgtctcaatggagaagacgaagtgacccttgagttctctcctgcagagctctgggtgggtctgcctctactctggaggctgaagggagatcagagttaggcctgtatttgctagaagcatcagggtggaatggggtgtgggtcttcttcaggtagagccagggcgttttctgggccccacagagaagacacagagccctggaatatagaggaaggctgtggcatggcaggccaccagagactctccctggggtccctggagtcattagccagacaacagcgtgtccactttttgtgtgcagcctgggaaagggatacacttgcatggtgtgagaggcagctctgaagaagcccagcagccagtgtggctggagacggccatctctggagaggtggtatgaaggataggatcccagactcaaggagcacactgtcctgtggtaaggtcccggcttgactgagctgggcaagtcatttagccctctccatctgttggagggggtggtggtgagcagatccaccatgtcagagttgtgaagaggccatgagacccacatggaattcttctgacacagggcttggcatctatagatgtccaacagtaggggctggctagagccagagctgatattccaaacataccctgagcaaatggggaggctggagagtacagcgaggggtgaaataccaggacctgagtggtctctgctcacctcctgccttcttgcctatggaccttgcatcattagacaagccgagacagattaggaaccatgttttacatgctactcagagtctttggcttatacctgggtggcccctacaccactccaggactatcttagcttaggtttagaaggaacagaacacttctccaggccagaccacctgagacagccttctcacacagtaacactgagtggcttctgacagggaggcctggagaggcagcccaaggaggcccgggcatctccagtggggaccacaagatgttggcagcacctcctggatgggcactaagtgaagcccaccccgggtacattagtgaaggatgatggttctccatgtcccccagcccatcaagcttcaggatccatgtcaatggatgccaccgtcagcacattttaaaataagggtgactctgagggctcatgatcaacatcaagtgcccagcacttaagacagcctgagccaggtggctgagtgctttacctgcttcctcccacatcatcctcacggctcctctgagaggcttatccccactttacagatgagaatacaagctcagagaggttgagccccttgcccccacatcagcatgtagatcttgcaagggtggcctggcctaaaagccagctgctctgtagcctttggaccagcaaccattcctccttccagcctctgcaagttgtggtcagtggcccccagggccccacatggccccacacacatgggacggagtactaaagtggtcacaagctttacccccaagagacacagcacactgaagatttggtagcaagcagccgtgggagagccatggggcacatttacacgtccaaagtggtttaccatgagacagccagagcctctattctgcctcatgcatcacctttaaagtcatcagcagagttctgattccccaaccatacacgttggaggttgtttctgaacaaagcaaaaataagcccagctcaactatgaggttggttggagctgtcactacagtgcagaaaatgagctgttcagaattacaaaccaagaaatggtatatggagcttattggtggagaatagggggcggggagctcatgaaaatctgaatttgcagtcacttttctaaaccttcctctccttctgagcatgtatgtcacctttctaggtctctatcttgagacatcgggatttggacggttaattgcccttgataagtttatggtagttatacatgcaaatccctatgcacaggggtgaaatgtggcccgtgaagcctctttttgttttgtaatttttattttaagtaaataaccaagacagcatttcatagtgttactaatatgctgctctattaaactcataacaaatatattattttctgcaacctagagtatcagttcatttaactgacactaattttgagccttagttgctttgcaaaaccttgctttttgctggtttgagacccctgtgttatatgctgagacctcggtgccttctgcgccggaccgcccacccgccccactctgcccctgcccctgccccagccagaagcaagtgtttaggctcttggtctaatgtgctgattcgggagagctctgtctggtctctccgtttagatgatgaggtaaccgtggggaagttctatgccactttcctgatacaggactactttaggaaattcaagaaacggaaagaacaaggactggtgggaaagtaccctgcgaagaacaccacaattgccctacaggtgaattgttgtctcattttgttttctcttttgactaacgattttacaagcttatttgaaatactagagagctgcctattcatggttgagcagtaccacaaggattttgtttaaactgagatactacacactcccccaaatgtggactagccatttctgggccacaaggtaagtgcttccctccccgatgcctaccccatagagccctgcacctgccactacccacgcggcagggctgccaggacggagaggagcgagcgctaccctcgcaccccagcccctccaggcagcatcctccaagcaggcacccaccttccccacagccctgggctccagggttctggctgcccagtgaatgaacagctttccatctgaacgcaagtgctttgttttgtttccgtttgtttcttaccccactgcttgttggtttttggtccatttcagtaacatccatcacctcctagtatgtattctgtgtgtgtgtgtgtgtgtgtgtgtgtgtatgtatgtatgtgtggtgtgtctgtctctgtatgttgtctcctgatggccaggaggccagctgtgcacatgctatgctctcatgccccagccagcctctggtccctctccctcctccacctgggccctgctgcaggctcctagagtgtggatgtggctttcaggaacctctggtaccagccagggtccttgcatgcgaggaatgtagaaacctaggaaagcccaaagctctgggatgggaagcaggtatgtggaggggcaaggaaggcaccatgaggaccagcaggaagaggggctaggaaggtggtctgtgagtgccgtggatgaaggaggcagggcaaagagggagaagatgctaaggacagggaagagggaaccacagaggctggcaaatcatctgaaacaactgacctctgctgcccagagtgctcataatccatcatggataggataaagaattttttaaaatctatttacgccacaattttatgcccctgttctcagtacatgttaaatttggccttgtagatattgataaggttcaacatggaagagtccttcactcttatccagggaaaaatgcgcagcgttgtgtgttcaaagtgatggtaacagcccaaatgagggcttatctttgatcttgctgagagagagaatatgaatatgaatatgaatatgaatgacagtgaatgagtgaatgacaaacatgagctgtgtgtgtgtatctcgtgggttagtagatggccttgtgtaacagtgacctgctgattcatggtgcaacctctgctctacccagacagctacaggggctggggaaagaggcatatgcgggttggcaggtggaccatgaatccgactgaagacagtgatcttcctgcctctcatcacgtatcctaaaggtagctgagggaatcacaggctcagtcacacagcccattggcatctcaggtggtaggatttgcaaatgaagctttctcacttccaaccaatccagtttgtaaaagtgacagcccccctcctggattgcagttcacagctagcctccgaaagacaaagcaaactgcagagatatgtttgcagattagaagaagtctctggtccatccatccttgagggcagcgtggccaggttgggtgccaggagagggagtgatgaacatgcttctgcaggcttgtccttaaaggagtcccctgcccagaagatgaggctggttagatggtttagttccatttcccagtgccctctgcttgtagggaactgcttattgttctgggagcctaattgggaccagaacttgataacttttctggagggaggaacatagtctgtcatcgatggttgatgtcctaatttacagccagcaggttagctaggtaccatgagaatcttgcattttctgtgagaggcatggcggccacttggatgcagggtcatttatactttttctgaacccccaagacttcccaattagacaatttcagcactttctctagtggctggaaatagtgttttgatgttttaagatatgcacaaacaacacacagctaagtcattaccaggtttcacgtatggggtttactgagtcttaagttgaagggtcaaatggcatgaatgatacagcggcaggttgtgggttaaaagactctttttgtgttgcaataatgttgagggtttctcctaaacgtttttcattttattgtttatagagtttcattttattgatgaaatgcaaacatttccagttagatgataccaacatattttcgcatggctccattgggagctgaagcatcgtctgtaatttatgttgagaatgcagcctggaaaattaagttgtgttcataatcttaatagagaaactgaaaatgtacttgattctgaaacattaaacatagacattttttttgtctccttgaaggataattctaattgcattttggcttcctgtgctgtagaaatggctgtgagtgtgatttgttactccatgtttaattagcatgagtaggctttcgtttctgcgtgatgaaataccgggtgacgatgtagcagttaggaaaatttggtgggacggcagtgggagagatataccaccagtgtaactaggacaaggacacagcctcgggaagcccctgagagtgggcgtggcctgttgagatggaggatggcttgcctcctcccacagcagggtgccccatggctggcagactgcgtgctaatggaaagtggagcatggccgtcgcagtgtgagcgcagaagtgcggacctaggcatgtgcgtgcttgtgctgcgtagggtgcagtctgtctgaacagcttccaggatgggcccaagacctctgcgcccccacccccagggaatgttttttcaaggacacatatacgcactgtggttttgaaccctgtgggctccatctgatctccctgtgttcagaccaactgcaatgctgcctcccacatgaaggggaatggcttgagctcctggatccatgtgtgggaaggagctcggcatccggtgtcttctggcctctgtggtctgaatgagtgtgcagtttccatccttccatccatcttcatcattaaaaccaaccttctctccagcccctctacagagggaaccagagagaagctgcatcaggccttttttaatttcctcttgcgcatctcctacatgccatgttcactttgggttgactcagcatttgctcgtcatccattgttgctacatccgagtgacccacgagtttccacgaggggcaaataaataaaggaacacagccatgcagccatgaaaattctcagtcctcctcccagcagacagcaatgcatgctgaatgtcccatcagaccttctagatgaggacatctgtgcaagttacagacactcattagtccagtgtcttgtggataagaaaaagaccccaaagtgggaaaagttttgttcatttctctttcttttaacattcaagaatttcctttctgcaaaagacatgcactccggtggaatccgaggacactatgtcccccactcatcccagatgggagcctttccatctccattgtaggaaagctttggagggatagtccttttgcctgtttggaagtttggtttaaggaggagaccattatttctagctataaagaattaggttgttaggttgaataattgtaaagcctgtgcccgagccgccagttggcgatgcaggtggttgaggggagatgtgggtggtatataagaagcaaaggactctcagcccctgatgtgccccgcgtggtcttcttagggaggctcaatgcataaagacagaagaaaatgggatcctccacagagatttaatctgtagaagatcaaacacctgttgcctggtcaccttagtctaaaaagtagtggagttttgttttgttatttttttaaagcatgattctacctgaagccatcaaaagcctctttttaaatttttttctttttttaatctaagaggagaacagatgctaacagatgagatttcactggctgattcgtttgtttcagatgcttgaacggatgctttagaattttctgcctgagctacggcaccaagctggttagtcggaaggcgtttgtggctaaggccttgaaagggaaaagtctcaagtgggcttatttctactgaaacagcatttcagaagaaatgcaggaaaaagcagacccaaggccccagggagaccccttccaagcaaagcactcctccggaaggtggaagcggggccgtggctcatctgcggagccagggctgcctgtcgcggacgttgctcacggtggttctttttcgtgaaagggaacgtacaaagcttaacagttttcccttccaagcagagactcagagaaagggaaagagtgagagagagcaaaggaggggggcagctgccccacagagaaatgaaatgaacacaacttcctgatgctggccagtaaaacaaaaaattaaaaataaaaataaaaagattaagcagacctgcctaaggtgggtatctgactccattccaaagtcctgcatccctagtttgcccgaactcccaaagactgacaggcccctcggcgctgagctgacagagttccttttgtatgccagtccgccatgacctcctgagcgtccggccctgctctctgcagagacccagtccagaatacagtgagaagtggacaggccaggaagctcagatacacccattgaaactaacacatacacccgcatgccaaaaccaatccaggcaacacctcaggttccatcttaacgtgtccacaggaaacaccaccacacccaaacctcatctaacattgtccgtctttaattcgtgctcagagccagtctggggatgcctctttggaagcagtgtggtctagtttcaaggacactgggagtcagggaacctgggttctagtcccagtttcagcattcacttgctgcgtgaccttgggcaagacacttaacctctctgtgcctcagtttcccccatctgtaaaatggggttaataatgtcgacctacctcacagggctgttgtgaggaatagctaagtgattgtaaagcactttgaacgtataattgcttattaagactacaacaataataatatcatatgcctgtttactaccagaactttaagaaattcttgttttcctttgatctcttttctgttctgtaccatacttacccattgagaaggaaaattccccccttttaaagaaatctaggcaatgcacaaagatgtcaacagaggtaaccctgcaggttgcattttcacatcttaagaatagcagatttttgcccaagatgttggtcgataagggtgtctgatcttgaattctcagctgattccaagtggtggttggagtctgtacatctgatgctgagcccaagacacccaaagtggccagtttgggttttaagatcaacattcaaagtagccatagtgcagaggtaatgcagaagaatctaaaaaaattgaagtatctgaagtgtatagagaaaagaagggcttatgagcccctttcacctgccctgatgtgtacaggctggaagctgtgtgtgtgtgcgagtgcgtgtgtatgtatgtggggtgtgcggagacaggggaagagagagccagcaaactctggggggccctattcctgtagaagtggacacccttccaagcatcctgggagggcaggagtcccaaaggctaggcagagggtgggagcaatgtcaccagtgggaagtatgctttctgcaggcttgtcctaggtgtgactgacagggtcagtcccagcctcagggtcttttccagtggtgtcttttgtgcctatgacatttgcccttggctgcagtcctcactgtaccgagaggtctaacctacctggacttcagtggacctgctgtcctcattatggaaatgggcctagctcccgactctgcccccatgtgtataagtgtgcagactagttaacatccaggagctcacagtaggtgttgtgggttctcacagcacagtccacagggcccaagggcaggtttgactgcttcgtgctgcaccacatggtgatgtgggggatggggtagaaagccaggaacactccagtgtggccaggccacttgtcaagatgttgaagcacagctgcacctggtatcaaccgctgttaccctagcacctgagtctccttccccactgccagcagcccagcccctcctgagactgctctgtgacccagcagctacaggtctagtgcctggcattgcagggagcctccaggaccctgctgtgatccaaaggcccacttctgctctgattgggcagcacctgggtatattaagttataagaatttatgaagaatgtgatgtatcgtccctgaaagggaagcccgtcagtcctgtgggggtccgtcagtccctctgtctgtctttgacccacccgacgttgagttgattcagtgctgaaggatggcacgtgcctaccccctgtatgtgtcactctgtctcagagggccggtgtgaccgaccttctagatccaagattccatacactcaggcctcggcagaaaggccccaagcgattcaagtgggcggcgtttccatgtgccttctccacgctcctcaaataagtaaaaactgacaagtgaccactttctagatgggacttagggagtgatttaaatggaacaagagagtcttctccacttgggcctggctgtgttgctggggaatggcattggctaaggttggtagccaaggccagcttaggaaagacagccaggaatcaggaaagctgcttccagcttcaactcaaaagggaaagaaggcttcctgaaacttgatttgcagtcaaactgcagagacaccgctgtcgtttctcttaaagccttggcagagaagtgtagcttctagtgtagtcaaagttgtgagagacgactcaagttcattatttagaatcttcacagacacacacagcaaacttggcacccccaacaccagcatccataggctaaactcttcagctcctggatagaagatgagaggcaggccagtatacattgtagggaggctcttctcaaatagcttatactgtttaacaacccaattaaaaattaatccacaggactattgggtactacattctatactctttctgaaagtggggagatctcattcctttgagaataataattatgttcaggagtctttgagaagaaagactgcaaagaagttaagtgatgtgacgtagtagtaaaaggtggtaattatcgtggcttgttatttagtaccattcacctagtgtcctttggcagcccaattgtgtcatgattagatgatctgtgcgaaggagctggctaagacttactaacagttctagggtgggtagaaacccaggtgagttcattctccttggcacctcttagacctaagggacacagctgtttgagatcttggaagggcacataattctaaggcatggtgaaggcaacccattcagacgtcccaaaggctggctcagggaagccataggaaggccatttcttccaagagtggagaaaggtccacagaagagtgggaatcctagatggggtaaaaaagtctacacctgaggaaaaagtagtagtgcctgttggaggatagattgatcagcagttatcaaactttttggtcttcggacccttttatactctacattattgaagacccttgtgtgtcaatatttactgtcttagaaattaaaacggagcagtttttaaaacaagaacatgcaagcacaaagacgccagggtgatgacatcatgcatcaggcagcctttgaaaacctcactgtgctctcatgagaggatgagagtgttgaaggcaaagaacatccttatgttatgcaaatcacagtgacctcatggacccctgacagtgtcttgggatgccccaaggtccccagaacacacctgagaactgctttgggggaatgctactaggtccccctaaaggcagagggtgctggagccttttaatcatctcccttgttaaagaggctcctgtgcagtggcactgccctaactggagcccttctccccctccagccccttcccagtctcagcccactccccggaggcatggagctgcctgtgtccccattcgtctagcatggccgagtcttgcggcctgtgctgatctgcaggtgtgatggtctgaatcagggcaggatagaaagtgtttttaaaaatcagctcccctaagtgcacaactgggaccaaggatgtgtgccaaacaggatccgtttcagggataacttttgatcatttgtcatctccatgctgacttaggaatataagagctctgctagggtagtcaaaagagggttagccttgatcaggtggcaccccacagtcgtgactataggtgagtaagtgtgtgattcagactccaatccagcgttctttcccagtaggtgcagtgactttgcctgggtggtggttgaggtggggagtttgggagaggtaaggcagcccagtgtcacaggaagaacaggcttaggggccaagagtcctcactgagcctttgactcatttgggcacataatttaaccacatgggaataactttggctctcccttcctcccagaatctagtggaatatttgtatgtaagctcacaatgactggtataaagatgctatcagaacagaagttgtgttttacagcttctgctaagcctaaactttacagaatgctctattatcaggaaactggcaagactttttttgattcggttgttaaaattacaacgaatcagattcctgattgcaccaagaatcaaggtggaactgaaacggagagctctcagattgtgtgcaggcaaaggtcatattttagataatttctttaaagtttcctttatctttccaagtgatgggaatagcgcaacccctaggggagcttgtgggggtcatgttacccctgacttttcagtgagggttggaatcactgtggatgactaacagagcgccaggatcccaaccctttatatctgacacaaggaccattcacaatggacacaaaggctgccatcacattatccctggaggagagtggtgacaaaataaggggtgtgcccacgtgtgatgtgctgaggaggcggacggcagcttgcagatgagcaggtttattccataagaacttaatctcattctgttttctaatggaactagtctaaaaaggtcccctctcattgggtatagactgaatcctgctaaagggttaaccagaacttgtcaccagcgagacgactgtgtgcagggccagcctaggctgagtgcagcctgcctgtgatggggaacaggctctgccaggcagggttctttggctggagtctcaaagcctggcgcttgtatcctgaagatgaatggcctggcccagtcccgactagagacatgcatctcttatctccactgctacagcgtaggtccagggcggggctctgggcacttgtgcatgcttgctgtggcgctgtgagggctggcagatggctggtgtgtctgatggagctagcttagggacacaggcagcaaaagcattgcaaatgcatctaggcaggagaaacttaaccctaaaagtgggcaggagaaagaaaggtaaatgggtgttcatatttgatgtcaaaatgtcatcatattatgctattcagaagtgttttgagacattttagttttttttggtaacttaatcattcaatagaatatctatgaaattccaactaaatggtgtctaaaattttaagcagcagtctacaggcaaagcgccaacatttcttttctaaaaattatttatgataacatctagcattttaaaatcaaccagaaactaggcttgattctgtttaatattttataagattggacatcttaaaataagtcaataatgtttatattttatagcaactctgtgtttcttcaaaaccatatttctgctgtgatgttaatggaatgactttatatggctttaattgtgttggtttaagtgctaatgaccacttttcaaattaaaatagtattttgctgatagaggtagacacagatatgagatatgaaagaatagataattttactgtttgtaaagtgtttatcccaagaaaaaaaatgttcttttttttagggctgtggaaaagtaattttttcaagagtctaagatagttttctgtatttctggggattggaacttgtgcctatggaattttgggagcagcctaagctaccttttagcttgatatgtgtgctagaaaaacttcattaccatgttttgtgatatgtaataaattcagggtgctgtgcttaagcttcatgtcaattctagtttgggaacatctgtttccctcactcccagtcgtgggggacagcctgacctggccctacccagaacacatgtgaaaaagtagagtcagtccctgactcttatgaggtctgttttttcctgcctggaacaagcagaatataatcatgatttctgactctctgcttctgtgtctgggaagagcgattcttctctcctcctctaatgtctctttaataaatatgttgtcattatttgtctttggaagtggcaacttgggccacctttcaaccttctccatgatttatgttgcaaacaaattctctgtcccatgtctgttcattgcactatcttgtcgactaaatcctaatcttgtgtatcactgaagatgtgctggagacagtttttgtttctattatgcaattatgttatatgtgtatttcagtgaaatgtcaacccgtcaacagaggatgatgttaaaaattatccaaataaatagttttctatttcttttaatcagacctagtccaatcagttgaatgacagtaaataggattatatgttgtttaaacttgggagcatttctggcctttactgccttgtaatatggattaatgtaccaaatttacttgggggtgttgacttaagtgcattataacctatgtttattttgtggaagcagcagcaggtgtcttaaaccttgtctttttgtttgggagccttagatatgtaaccgagttttcttcccagttgatccaaaatcagaagtgaaccccttgcttagctcaccatcccttgatgatgtaccctaggaagctctgaatgaatgaaatgcggctgtttagtactgccgggtatgacctttcttcacgttcctgcagctgtgctgtgtaagagcttttaccaacatagcattacagttgccttcttgatgtttccatgagaatggcaggtgggtccacctcagaaccaaatgacttcccaggctcagatgtgctgaactcgtggatcctgagagagggaaagtgtgtgtatgtgtgcgtgtgtgtgtgtgtgtgtgcgtgtgtgtgcgtgtgtgtgtgcacgtgcacgcacgtgtatgcacaagcatacccacatgtgcatatgtgtacacacatgcatcctgagcctgtgatcagagggacaggagagcaagaagcagcctccctgaccaccccaagaactgtcttggtttgacccgggacatgactgtctgtcccctataagatctcagcattcctagtcaggaagcttaaagctttcattcccagctcttccttcaccttcagaattcactaaatggaaagatctgctgctctatcttcacagaatggttcaaaccaaacccaacctggcaccatttttagcagaattgtctcaaaggcttggtgcttttgtgcaccaggctatttttataagggcctcttgggaagttcctgtgtgactttacattctaaattatcatcaccagcactggcattggcaactgcaggagaccagttttgagcatccccagaccagtgggacccagccctgatggatctggccagactgcagccaccatcccctcctcctccctgaaccacttctgggcatctgttctaccccatgcttgtctcagggatggtcatcatgcctatctgtccttgccacagctgcccacatgctaagaggtgttgtggaggaaggacagggaagcggtctcctctccgaggacccaccacttagtccagttttcctttgcaaaccaccctgaggttgaagcatttgctgcacatccattgtcttagctgttctccaggcctttagggctacagagctgtggacagactgccagtgagtgaggaggggctgcctggatacaggaccgtagacccagggcagagaggacatgccttcttcagatgcaggactttctgtggaaaagaataaagttgccatacagtccctattagtctttaactcagcatactgttttccttcaaactggtggtcaaaacatcatcattctctcagagctggagcagtaccttcctccatgcaccgtgcataagcatcttggaatgcttccctaatgaagtcgtgaacaatggaagggcttatcctgggccctgtctcaacatagcagggaccacagtgaggaaggcagctgtgagggcgccaggggagatgcagagtatctgtgacgggcccagagggatctaccaggggtgtcttctggtgggtcttgcactgcctgcaaaggctgataagccactttcagtttgttgtgatcttcaaaaagcggaccccctgttggtgagttctcagcctgcacacaggctacaggccagggtatcctgatgaccacggtggccgggtcggtgtgcgtgtcagtctgctccgtcgtggtccgagtgtgctggtggttgcagtgtgttgtgtcactcactcgttccatggctttttagcagaaccagtggcctgaggactgcttggtctgcttgtgcctctggcacctacacctaggcttcctcatcctagatgcagcaagggagtccacatcagcctccctttagatcggccaggctgtgctccttgccctgctctgggcttggagagatagggctcttgtaggcgagcctactgaagactgtcactgagacaggggcataagctcttggcctggcagatcctagcactagtaaccaggcagtgttccttggaagtgggggttttgcaaaggaggttacggggttgcaggcctcaggcatcctacctaggaccttcttgaccctctggatgcctgaccataccaacaacccttagactgccttcagtgacatcagtcagtgccctggattggcttttggggaagccttcctccccaccgctgaatcaggaaggagcaaagccaggacccaggctggccccagggcccatgtgtggtctaacctgttctgccattttcattgatctaggcgggattaaggacactgcatgacattgggccagaaatccggcgtgctatatcgtgtgatttgcaagatgacgagcctgaggaaacaaaacgagaagaagaagatgatgtgttcaaagtaattattccacgcctagctacacactggccatctggaaatagcagggcaggactccagtttgggcagttaatcatccacagaagagtctggagaatgcagcccatccccagggcctagaggggctttcagaccacaccctccccctcttacagaccctccccaggcatcagcacctcttctagggccaggccagctctttccctgagcttacccagcttcccctcactgcctgcttctgaggagctcggccacagccgctggccctgtggatgagcatcctgagtccttccggcagctgcctttgctaccctcctccttcccgggccagctctttgatctgccagctggctgtcagtcccccagcccagagagcatgcccaaccttggggccaccagccagcccagctgggtataagtcaccccaacttggagcaactggaagagcacactcgagtgacagccgacagcttgctccccagctcaggaaatcggtaaccttcctcatctcggggggaccaactgccacacagtcacattcaccctgatcattgagacactcagattgttttacagggatcctacggagcttgcctagaatttgtttttcatgtagaaaaagttacctaacatagctagtctgcatcaaatacttgttaaattacctggtgttgtctcccattattttgcagagaaatggtgccctgcttggaaaccatgtcaatcatgttaatagtgataggagagattcccttcagcagaccaataccacccaccgtcccctgcatgtccaaaggccttcaattccacctgcaagtgatactgagaaaccgctgtttcctccagcaggaaattcggtgtgtcataaccatcataaccataattccataggaaagcaagttcccacctcaacaaatgccaatctcaataatgccaatatgtccaaagctgcccatggaaagcggcccagcattgggaaccttgagcatgtgtctgaaaatgggcatcattcttcccacaagcatgaccgggagcctcagagaaggtccagtgtgaaaaggtaaccttgacaatgtgtttggacttgctcatgtggtgtctgcccgtgttgcgtctagtcccaaggagcaaggcgggtctgtgctctgtgctctggggcatggaggaggttccccgtaggcatttgtgtcaggatctgtgagtgccccccaggtcactgctgcctctgacactctccacgtgatggacctaaaggataagggccacgtgccatcctacatcctgtgtggggtgccgagggaccttaaaacagcagcagccacaaaatccacctctcaattgtgctcacatactgtgcgacaggggttggtgaattgtttctctaaagggtcagtgagtcaatattttaggctttgagaaccatacagtcttgcaccttctcagctctgccgttgcagtgtgaaatatgtaagtgaatgggtgtgtggctgtgcccattaaaatttccctatggtcactgaaatttgaacttcatatatttgcatatgatgagatattttttgtcttcagattcttttttatgtttttcaatcctttataacaataaaacccgttcatagcccatgggtcatacaaggccaggtggcagcccctatgtggatggcgaatcataatttgctaacccctactctaggaggtagcctgatgtttgcattgtaaatttggttggaaattaacttttatcttctccctccttcccatgttatgcctttcctggatagaacccgctattatgaaacttacattaggtatgtgctcattacctgtttttgtgttaaatactgtgatggtatgttaccagctggcctctctgagtgctgaagaatgagaaacacttctttgagccagcctattaaaggttatcataattcatggctgtggactcagaggtcagaggttgttgcttctaagcaaaggcaccttcagatccatatctctgtcgactctgttgccatccaaggactggtgtccacacacaaggtgcaccccatgggctggctcctgcaggcctcgcgatggcactaggagcatccattgtgcatttacaggggcctcagcctgtgtggctggcagctccggctgctctctggggtcaagcttcttgtgggtgctttgcagcatgacccaaacctcctgaaggtcaggaatgggatcttgtcattttccctgtagccctcaagatatgtgtagtatattccactccacatgtattgacctgagttgaattgtgggcggaatgcccattttgttgggggccaagggaggatgggtcttcctgtgtcatgttatgaagtgaagtcgggagccatgtgggcccaagttgggtgcaagaaagtggagaagtcagaggaagtgccatccttcctttggagagaggattgacatcaccacgtccttctctgaggactgaggccaggatgagccgggtttcagggagacttaccacattcctggggcagggcagcctttggaaacatggtggacatgttctgtgacagtttcccctgtggcactgtatccagaactcactcgaccttcctgatttgatacagcaggaggtcagtggccaggaagctcctttgttccaggttctgaagtcacactgggctggagctgggggactagaaggagagggagggatcagagcagatgccctgggaacccagggtctttttccctaggtccatttttttgttctgttctccaaattgcacctattcctttggctccaaggcctctggacacaatggtttgacaccaacattgtgcagggcactgagagagaccctatcctggcccgcaggcacaccacacacacagacacacacacggtgctgttgccagaagccggaacagtccagtgctgcctgaggcaggtgcgcgctgggagaagccaggagcacccgggcagggttgccggccacaggcagaggtgcagctgcagcaggaattatctgccgcctgcccaggttctcagatcctctctcccaactgcaggtccgactcaggagatgaacagctcccaactatttgccgggaagacccagagatacatggctatttcagggacccccactgcttgggggagcaggagtatttcagtagtgaggaatgctacgaggatgacagctcgcccacctggagcaggtgagctgctctggctcctgtggagagcgggaggccgccctgccctggtgctcggcccactccggaagccagggccaccggcagctgcacttgggcttcccctaaaaagcaaaatgggagcagaaactccaggccagagggagagtggagctggagaaagagagccgcagagaggcagggtgagggctattctttcagacctgttgccttatttccactaggggcctctgaggccttttagtgaaggcttgggaaatgggagatgggcctgcttcgtggctgggttaatgcctttccaccacccgtctttggagagatcagtttttgctgaattaacacttggagctctggcggccccagggctctgtgtggacggcggcttggccagcctggagctgggccaggtcctcatgcacagcacctgcctcctgccacttcaaggggtctctcggggagatgaagaaatgaggggtcactcagcagaggggtccatcttgcttctgtcctacagaaagaatgtttgttagtacaatgggcactctgctttaggaggcgtagcaggcggcacaggcggatgaaaatcgccctccaccctcttctctgaaccgcacctcactgtgaccaggggcccagtgaagtggaagtggaatggcagtgaggtggcttctggcatctgagccacagcctgaccctcaccctctgctcccgcagcccttccccgtgcctctctcaaatgcctgacttctgaaaccactgactctgagccagatgaactcgtgttcccttctctagggcttttgctcacactgtggcccctgcttggatgccctcactccgtctgctggcctcatcccccctgtcgagggcctgctctagggccttgctttttatttccatgactggaattgaaatccctcccccaacccccagaaaagaaaacctcacgaaccgcatgagttcctctcttccagcactggccctttccagctcgcatttgatttctgtgtgctcatggcattttctaagcccattgagggtggggctcatgcttcatgcatcttggtgtccttggtgcccagcacctggcagagggaaggcactcaggagaggggctctcacggaggaaatgagtgggtgagagcctggctcacaggacatctgcgatccacatttgccctggagctgagggatcaaaactgccagcacatccctcagcacaggcctccagtcctgtaatggcccttggtctccatctggaatcttccatgaaactgaggccagccttgttctcagccaatcctactgtgtccaagggaggaggcggggagaggagtatggatgtcagtctggcagggttgagtgacagagcttgttacctagaaccttactgccctcctctctgacctccaggcaaaactatggctactacagcagatacccaggcagaaacatcgactctgagaggccccgaggctaccatcatccccaaggattcttggaggacgatgactcgcccgtttgctatgattcacggagatctccaaggagacgcctactacctcccaccccagcatgtgaggccagattttttgttttgggtggaacctcccggggaacagtgtacctctcccccaacccccgctctgggggccggtgatggatgtgtgctgccaggtcaggatccttagtcctcaagaccagcccccagccagagagtgtgtctgctttccttcctttctcatccatatctcacgtgatagagctctagcctcttcagtgctatgcttgactctctttgagaagagagaggctgtggggccctaagattgcacgcacacatctggtaaggggtgttttgcatacatagcattgtctttgaacctgggaccatcctgagagggaggcaaaccacacacatgcttttgctgttgtcagccctgctgcactctgtgatggggtgactgagcccccaaaggggaagagtgggctcaagtgcagagctggctgtgccgcaggcctgtcttgcaaaaccccatgcctctgagggccacctgggcattctggtgtccatctgtcctcaggcccctccaagccttatcctcctccctcatctctgctcctcctccctccctcatcttccctcctcctcctccatcttccctcctcctccctcatcttccctcctcctccctcatcttccctcttcctccctcatcttccctcctcctcctctatcttccctcctcctcctccatcttccctcctcctccatctttcctcctcctccctcatcttccctcctcctcctcctcccgcatcttctcctcctccctcatcttctcctgctccctcatcttccctcctcctcctccctcatcttccctcctcctccctccctcatcttccctcctcctccgttcctccctcatcttccctcctcctccctcatgttccctcctcctcctccctcatgttccctcctcctcctccctcattttctctcatcttccctcatcttcctcctccttcgtcttctagcatcttcctttatcttcctcctccctcatctaccctcctcctccttcttttccctccccctctcctccctcctcctccctcctccctcctccctcatcttccctcctcccccttcctctcccttgccttccctcctcctccctcactttctctgcttctccctcatcttcctgtcaagtctgtcagtgccctctgctcacggggcaggttctggacttgttggtccccttcactctggggccaggaaacccatcccacctagaggggctggggctggggctggctgcttccacctgctttccctctgcagcggtgggtggcaggagctggcggatctgggtcatcctgagcaaggaactccagctgggggaagaggtgcagccctggccccttccagcccttggctgaacagtttcattttggacatgtgggcattttgctgatggttaaggactatccatttctggaatttctgaggaatgaagcatatttttgaacaggactctaatcagtaaccaaaaatagccgtgacacatcggcttctgagtctgccaactgcatatactataaagagcaccactgggaggtgcccagggccctctgcctcactccaactgtcacagccccactggggagtgtgaccagacccatttccatggttaatatttaattcctcagccctgaacacatgcagctaaatgaagtcactcctttcccataaatactagatgaagcagatgcaggtgaggccgggtgatggccctcgcccttgtgagttccactgccttcctcgggcctcggcctttgtctactgcctacttggccaagcaagcaagcacatgaatcccaccagccacagtgccagagaggagctgagtgggcaggagtggctgtgctcttgattcataaggtggttttgctttgctgccccgcagctcagaccttggacaggaagaacatttccctcctccacctgtgttctcagctgcagggggattccctcctcctccagagagtgttgtgcagagcacatgagatggtggggatccctggagcattttagaaatggaaaagcaccacatacaggagagggaccgctgctctcctttcccagcccccagcccggccattcgatctggaaacctatgctccacagcacagttggcccctgggtggtgcgtggagggaaggctttctgatgaggcagccgtgtgtgtcccatgtaggcaactgaaccaggaggccccacagtgcgcactgggcacgagagaccaggactggctgtctcgttcctctctgctgggcagtgcctagccaaggactcagcccggtctcttgtgtgcagccccagtgtgcctgggagtcctcccctggctaggccctgggctttccaatagcggaatgaggggcatgtggagttttgccagggctgagaaaggaggccctgtgatccgagaaaagcagcggtcaagataggagccatagaaatgccttgtaaacgataggtgtgctctcgacagaggcccctgcaaggggtaggaggtttctgggaggaggctgctggctgtgtcttagggccccagaattcagactgatctcccgggcctggtgccctgtgaagctgggagctgtggattgtcttgttaacctctgtgtgagcctctgttggaagagctgttagcaggacaagcattttcttaaaattagaggtgtcctttgtttgtattcagtgctagagaagctgaatctttcccaacaaaaataatttgcttattacctggtcaagctgatcagtgcaggtaaagtccctccctttaaaacaggtgtaaacacaggagccccagcaagatatgtcagctgctggggacacttagggtatctggaaggtgacagtgggaagtgtcgtggggttctggcaggacttgtgttcttgcactgaagtgctgtgcgctccccacagtatgcagggccagggcttctgactcggatcagttgccctatgggctgccttcactcctcctcctgagaacaggcgaacgtttaaaagtagtaagttctctttgggaggctgaggcgggtggatcacgaggtcaggagatcgagaccatcctggctaacacggtgaaaccctgtctctactgaaaatacaaaatagtagccgggcgtggtggcgggcgcctgtagtcccagctactcgggaggctgaggcaggagaatggcgtgaacccgggaggtggagcttgcagtgagctgagattgcgccactgcactccagcctgggcgacagagccagactccatctcaaaaaaaaaaaaaaagtagtaagtttgtactttaaaaaacatccctcactggggcttctgccttcatcctctcctactaaagtttggagacctcactacctaatctttctcttggacaaaccgcatgcttcttcctgggctcgttgctgagcatccggggccaccctgactctgaaagacggtgtcccggcagagaacttgcttcacagctgtgtgatgccctttgctttcccagcccaccggagatcctccttcaactttgagtgcctgcgccggcagagcagccaggaagaggtcccgtcgtctcccatcttcccccatcgcacggccctgcctctgcatctaatgcagcaacaggtgagcggcccacctggccttgcccccacacctaggggcaccccacataggacccccatcaggtcactcccttctccttggccttaagcaccaggagggaaggagagaatcttcacctacagtctagttaatctttgtaacaatcctgtcaaatagctatggccatgagtcccatgctgcccaagctcacacaagtgactgctggcatttgaatccagggagccagctgccaaagctggcctcactgcccaggtgcctccctgcgatccccaccacctcttcctggcattgaatacagagcctgatgtgatctgagctcagggagtgggggccacttggctgattctgaacaagcggtgcagcccttcattttctctaagaagtggttccttcattaagtttatgggtccctccatgggcagggccctgtgggtactatgcagggttaacctcccctgcctacaaagggagcagtctggggagaacagtttgcccacgttgagggcggctgcacaggcaagagggtggggccggagcccactcactagggctttccctcaaggataacaatatggcgctttttctttctgaaaatatcacatcagagatgccattcattcgtgcacgacagggtggtgggcatggacctgtgctgtttacagacagcgttccccgtccctctctgcagagtgtgaaccccaaggtgcatctgccgtggtgggattgtaagaccggggcttgtacccagtgctttagcacatgccaaatgccggctctaggatgcattactccagagcaaagagaaccagctgttttcctataagtgctgggaagtggtagtttcccctgaatgtacttcggtatttaaacccagcatgaactgggtggtgtgttcacacccacagcttgttgggcttccctgattcttcattctgaagcaatttcatgaattagcaactgatacctccttgggaaaagccaaaggaaatgcattatggattcggggtaaaagaaagcacagtctgctagaaaacaaagtcatcaccgcccattcattcagcgtacttcagtgtgcccatgtcctttccaagtccttgcctggactgcccctggcgagcgcagcgccggtgcttggtctgtgcgcagaaggtttgaggcccggacctctgagaacctctggtctcccaacagtcccctctttcctcagatcatggcagttgccggcctagattcaagtaaagcccagaagtactcaccgagtcactcgacccggtcgtgggccacccctccagcaacccctccctaccgggactggacaccgtgctacacccccctgatccaagtggagcagtcagaggccctggaccaggtgaacggcagcctgccgtccctgcaccgcagctcctggtacacagacgagcccgacatctcctaccggactttcacaccagccagcctgactgtccccagcagcttccggaacaaaaacagcgacaagcagaggagtgcggacagcttggtggaggcagtgagtacggttcttggccgtggtgggcaggaagcaccaggagcagcagaggtgcaactgtaacagcaggaagggcagtggtgggagggcggccaggctgtgagctaggctgcctcaatcagacacttctgagcagcaggaatgtacctgaagcatgagtaaaaactggtcaccaccactggctgcagtggcttacgtctgtaatctcagcactttgggaggccgaggcgggtggatcacctgaggtcagcggctcaaagaccagccttgccaacatggtgaaaccccgtctctactaaaaatacaaaaattagccgggcgtggtggtgtatgcctgtaatcccagctactcaggaggctgcagcaggagaactgcttgaacccgggaggtggaggctgcagtgagccgagatcacaccactgcactccagcctgggccacagagcgagactcttgtctcaaaaaaaaaaaaaaaaaaaacaaaaaacaaaaactggtcaccaccgtcaattctcataaatgagctgtgctggcattatgggtgctgttccggcatatgtttctagtttatactaaatgtctttccccagtgggtttcactcttgttgggccatgtgtagttttttagctccaggacattttcaaagccatttacactagttattatgtatgaggtctagaaaacatgattgagctgcatccccaaagcacacggtgcagttaagttagcactggagttgatttttctgtcgtccccctgccctgcaaagccttataacacccccatgccatccatccctcttttctgtacaggtcctgatatccgaaggcttgggacgctatgcaagggacccaaaatttgtgtcagcaacaaaacacgaaatcgctgatgcctgtgacctcaccatcgacgagatggagagtgcagccagcaccctgcttaatgggaacgtgcgtccccgagccaacggggatgtgggccccctctcacaccggcaggactatgagctacaggactttggtcctggctacagcgacgaagagccagaccctgggagggatgaggaggacctggcggatgaaatgatatgcatcaccaccttgtagcccccagcgaggggcagactggctctggcctcaggtggggcgcaggagagccaggggaaaagtgcctcatagttaggaaagtttaggcactagttgggagtaatattcaattaattagacttttgtataagagatgtcatgcctcaagaaagccataaacctggtaggaacaggtcccaagcggttgagcctggcagagtaccatgcgctcggccccagctgcaggaaacagcaggccccgccctctcacagaggatgggtgaggaggccagacctgccctgccccattgtccagatgggcactgctgtggagtctgcttctcccatgtaccagggcaccaggcccacccaactgaaggcatggcggcggggtgcaggggaaagttaaaggtgatgacgatcatcacacctgtgtcgttacctcagccatcggtctagcatatcagtcactgggcccaacatatccatttttaaaccctttcccccaaatacactgcgtcctggttcctgtttagctgttctgaaatacggtgtgtaagtaagtcagaacccagctaccagtgattattgcgagggcaatgggacctcataaataaggttttctgtgatgtgacgccagtttacataagagaatatcactccgatggtcggtttctgactgtcacgctaagggcaactgtaaactggaataataatgcactcgcaaccaggtaaacttagatacactagtttgtttaaaattatagatttactgtacatgacttgtaatatactataatttgtatttgtaaagagatggtctatattttgtaattactgtattgtatttgaactgcagcaatatccatgggtcctaataattgtagttccccactaaaatctagaaattattagtatttttactcgggctatccagaagtagaagaaatagagccaattctcatttattcagcgaaaatcctctggggttaaaattttaagtttgaaagaacttgacactacagaaatttttctaaaatattttgagtcactataaacctatcatctttccacaagatataccagatgactatttgcagtcttttctttgggcaagagttccatgattttgatactgtacctttggatccaccatgggttgcaactgtctttggttttgtttgtttgacttgaaccaccctctggtaagtaagtaagtgaattacagagcaggtccagctggctgctctgccccttgggtatccatagttacggttttctctgtggcccacccagggtgttttttgcatcgctggtgcagaaatgcataggtggatgagatatagctgctcttgtcctctggggactggtggtgctgcttaagaaataaggggtgctggggacagaggagcaacgtggtgatctataggattggagtgtcggggtctgtacaaatcgtattgttgccttttacaaaactgctgtactgtatgttctctttgagggcttttatatgcaattgaatgagggctgaagttttcattagaatgcactcacactctgactgtacgtcctgatgaaaacccacttttggataattagaaccgtcaaggcttcattttctgtcaacagaattaggccgactgtcaggttaccttggcagggattccctgcaatcaaaaagatagatgataggtagcaattttggtccaaaatttttaatagtatacagacaacctgttaattttttttttttttttttttttgtaaataacaaacaccactttgttatgaagaccttacaaacctcttcttaagacattcttactctgatccaggcaaaaacacttcaaggtttgtaaatgactctttcctgacataaatccttttttattaaaatgcaaaatgttcttcagaataaaactgtgtaataatttttatacttgggagtgctccttgcacagagctgtcatttgccagtgagagcctccgacagggcaggtactgtgccagggcagctctgaaattatggatattcttatcctcctggttccttcggtgccaatggtaacctaataccagccgcagggagcgccatttctcctaaagggctacaccactgtcaacattatcctggactctgtgtctctctctgttgggtcttgtggcatcacatcaggccaaaattgccagaccaggaccctaagtgtctgatagaggcgatgatcttttccaaagtcagtacttacaaactggcattcttacaggctgcaccatttcctagtatgtctgctttaagcctggttcaacctctcatcgaatattaaatttttctttgtaagaaaaatttgaagttgtagagcatggttttttgttttcccttgtcttaggaaagttttaagatgaaatgtttttcctttttggtcccctccccatctgaaaaacacacatttttgtgtccacaggaataacacatttagtttctttagtcttatgtttttcataatctcacaaaatgtaaatggcagctatgatttcaccgtcaactggcagcgagaacctcactaagaaccatctctgctcagcctatggactccgacatccacccagacagctggatctcgcttcaccatgtggcactttccagctctatcctacgaagtttcagaattgggcgaaggccaggcgtggtgggctgtgagggccacgttacctctcggtgcagtctcacctgtgtgagatgggaccaggggcaccacttgctttcctgctgaccctgctatgagaaaaactggagcagtttcaccttgtgtacttctcagcatcgtaagtgtctttgccaattgcatttcctagaaaagttgtactgttttgataggcagctggctggtttagaaaaaccagttagccatagaactgacatcacgcagagagccccgactccctgattagcccaccccaactcaaaatctgactccagggatgttttgttgaaaatgttatttctctaaaacagtatttcttttcctctcctggggactaggagggcaggagacaatgaggagcaggcctgggccctggttccaacatcaagagtgacagggtggtctcagggatgtcctgtgagggcagcctgagccactaaacaggtccagtagagatggtattttatctttaaaaaatctgtattggatctgatgttaagttggcttatcagtagaagcatgaaaccacttctgagtggcgggacatggttggctggagaagaatctgtttttttgttgtttttttttgagacagtctcactctgtcacccagggtggagtgcagtggtgcaatcttggctcactgcagcctgcgccacccaggttcaagcgattctcctgtatcggcctcccaagtagctgggactacaggcgtgcaccaccatgcccagctaatttttgtatttttagtagagacggggtttcaccatgttggccaggctggtctcaaactcctggcctcaagtgatccacccacctcagccttgcaaagtgctgggattacaggcgtgagccaccatgcctagccaagaagaatctatttgaattcgtggagatgatgcctgcaaccttcgctacaagcagaaagactagatgtttgggtgcctacaactcctgcttcaggaactcaccatctccagtcaggctgccagatgctcttggctcccacacagcccacccctatcccctattccatcaggagctgccttctactagtgcagcggcttcaacacaggcttctgcaataggtcagggctcctgagagcactgggcacatggacagcgcattctgttgtgctctttgagccatttttgcaaagcacgtttctctgtttttaggtactgcaagcttttggccaaggggcccaattccctatgagactgaagatgggggggtaccctctgtgcaccccactttgtagcaagtgcctttctcccccatgctggcttcctcaggtgacagcctctcctcctggggtgaatgaaagactcccttcatggcaggggaacgctcaggttctggacatgtgacacttaccatcttttcttttgaacctcattcctgtttatggccaaattgtgcgattgtgtagaacatggctaagtatttgagagtgaaagaagggcctgggtgcaattgagcagcatcaccaatgggctcctcttaccatatgacgttttgcttattttaaaatacagccaccagactgaacccaccatggtctcagacactgacacacccatgggacacagagatggtagaactaagtgactgtcaccctgccatatccatacctgttccagagaagaagggtcagcacagtcatggttggtccaggactatcccctgcccctgaatccacacacgctccagcaggaaagctgcacgaggccctccaagttacggggctggcacctgaactcctgtttctgcactcttgcaggcagccccgagacccaggtgactgatggccatggactgctgctgtggggcaggtggggaccctccgtaggagaaataagtctcttggccggtttagaattttttttcttgaccctctcttcgaacaaaaattttaaaaaatacaggtaagattaaacaagagctgcttaagatttttaaaaggagaggtgtgatgggtttcttcctgctgcctctctcgaaggtttttctcagaaaactaacttgtggctgtcggacgcccccccccccggccccagtctgtaagccgccccaatcctctcagatccgagcaaagcctggaatcccccaatttcctcccgtccttattctgggcctagtatagctgcaggtttccacgcaacaatgcttttcttcccagcccttgacggtggatgtggatgtctggaaaaatccaagtgcattttattttcattaccttgtcagaacagtctggagaaggcatctcagttcaaatgtgagtgactggatcactttattgaatggtaagaaatttaaagagcaaagagctgttgtaaatgctacttgtattttttttcctccaaaactccagtcttgaatttatttttctttcacacaggggcatttctacagccacagggtgcatggctgtgcttaactgtgttttccatcctagtctgttcctgtggacgtctacagaataagaattaaccatccttgtccactgctgggatggctcaggctgccaagtcatttcccaagaccagtatgagagagtcctttctcgggctagctgcttcagtaggaatcagtgatctggtacgtggggtttgctcttggtttctgcatttcttggtaaaaggaaaaccttttaaaatgctaagtcataaaacctttggtagtgaagccaagcggcattccctccagactcctctccccttgaataaggtccataaaaatctcaggtttttttttttttttttttttttgagacagggtctcaccctgtcacccaggctggagtgcagtggtgccatcagggttcacaggagcctcaacctcctgggctaaagccatcctcccgcctcagcctcccaagtagctgggactacaggtgtgtaccaccatgcccagctaattgttttccagagacaaggtctcactatgttgcccaggctggtcttgaactcctgagctcaagtgaccttcccaaagtgctgggattacaggtgtgagccctgcacctggccctggtttaataagaaccagagccacaaccctctcagagtgacccagtggagccccagttacctgcctcactctgagagtgaaattaggcagcgagaaaggaaaagccagtttttcaaccagcaggcaactttcccctctcaacagggacactggggacttatgtgccagcccaggctgaactaactactgtgtgacttactgcctcagctaaagcttgcagctcaagaaggaggatgccccttccttcgcgaaccctccgtgggtctggcaggcacccagcctctgtgcatggcctgggaaggaaccactgccctgggttagagaatgccacgtgaacacaagaaaaaggatgcggcaggagttaaccatcctccccttctgtccctccaggaggcagggaggaacatctcaggctgaatgctggccttccccaaatggcccacagggaaaggctggggaaaaggagctggattcactgcccagtacttgtctcatttcccaagactttatccaattctcagccactgagtagggtaccacctgggtcctagtgtgctagatagtttcaggcaggagcctgggagcaagggctgtgctggccctcttggcttatcagggggcttccctggtcatcctccagcagcaactgtcttagcgctgggtggccagcgtcctgggcttgtagacagggacatctttgtcccagagtgcaggctgccccttgataatgtcagctgccttctctgcgatcatgattgtgggggcgttcaggttgccgctgaccatgctaggcatgatggaggcatcgacgaccctgaggttttccaccccgaggacccttgtctgcggatccaccacggcagtgggatcggagggctggcccatcttacaggtgcacgaggggtggtaggcgctgtcggcttttgcccgcacaaaggcatctatctctttatctgactgaatgtggcttcctggctggagctctttccctcggaacggagccagggcttcctgtgcaaaaatttctctggtgagcttcacacacagacggaaatcctcaatatcagtttctgtcgaggagaagaaacaggtgaggacccctccttttgcccgtgctggcctcactggaagattcacggcatggagaggctctgtaagctgtctgaggggatggtgtttggggacaaagttcagggccatgggggactgagccagcaggctgcttgtccctgcccacagcgggttagactgtaccgtgtagctcaaaggtagcatcctacacggacacagcccacccagaggcccaggtttaaatcagggatctgacttatctgtagggcagggataagtacacacaccctgcccctgctacagtggggctgtgagcaccctgcagccactgctgggcaaaacctgcccagtgggtagtgctcgtttttgctgcatgcaaagaggcaggcccaggaatggaatttgcttttagagactgctcagagtgacaacaggaaaaatgctctacctacagacctggcacctgcatggcgtggtctccctgcacatcatggcagattgttctgaaagctgaaaatctcccctactgtctaaaccctgggacttcatttatctcatgtgtcccaggacactacggggctgcctatgcaagtttacagcctaaagtgacacggtgggggacgacagagggtcacttgtgtcctagaaagtgtagtccaagggtatgattcagggataaacaggaaccccacaaaggcattcgtttgttcaagcccaggaagacacaggtgggtgaagtacctgttgacaagtagttgggctggatcacagggtggtcttggggattggcacttctcagtttgagccagcccacactcgtgccccgcatgggccccacatgtacctagaagaacacagaggaagcagtgacggtccctccatagacatccacagtgacctctgtcaaccctggtttacctgtagggtgggcctctgcttccagaatcagtggggaacagatgcatgttagcatttgcccgcatggtacccacctccacgagtgattacagaccacctcaaggaatcactctttcatcctggcctcatactccatggctcaaagctttcagaggtggtgatcccagagccaagtcagcccctctgtttgtcccatttctggtgctcggtacctagcctgcatgaaacagtcataccattggcatgcaccacgcagactgacacgctgggcagctggaaggcaggggacaggcctctgtgtcccccactctgcagccatatggcaccagggagaatgctgccttggaagatgggagcatcttccttcctggtgggaaggagacatcctgggaagccgaggctcttccacctgctcacctggtaagcctcctgctgggtggggacccgcccgtggtcaatcacttgggatggcaggaaatggaactggatgtccgggtgggggaccccaggctggctgcggatgaacccacctgtttccagatgggcagtggctccctcccctgagaagcagaagaggatgaggcagaagagccagtcaggccgtggcaggtgggccggctgctcctggtttccctcctttctcctggccgctcctcttccttttcccggactccactctagtgcctggacccaagtcctgtccacatctgttcacccctcacagggggctcacccagcaccacaccataaaatgtcagctatttgccaaaaggatggcatcagctctgctctctaccagggccaattctgccactgcccatgccacctgccttaccggctcttcccactacctagcacagcacacagcacatactaggtgtgtgagaaatacagactgagtggatgggtaggattttaaactaccagttcctggcccaggcacagctagaaatcaaatggaaaaggttgaaagatgaatgctgattctgcagtctagccccaaagtctcctctctccaccttttctcctggctccttggacctcacctgctgtccagcacaaggccatccctgctcatccgtaaggaggagcagcccctaagccccgaggagtctcacctccagcaggccctgggccaagctccttggcatgtgctattgtttctggtcctcgcttcaacctgtcaggttgaaactgtgcatccccattttgaagatggaaaaactgaggctcagggctaaggtaaatggcatagttccgcatcaaacccagtggccagaacccctgttcagctcctcaggaaggaggtctcaatgcttataggcagtctcctcccaggttactggtaagcgtgctcacctgtgaatttccagagccactccagaccaatgcagaccttccgcaggggcttctgtgctgaatggagggtgatagggcgggtgcatgcctgctgaatgtagatctccaggtggtcttgcaggttctggccaacccctgatacgggaaggagtggtttagaaaatggctaccaagggggctcagctgcttctcaatatccccccggttttgaaaaattctttcctattcccttatcttctggaccagctcctgctcagttccctggtctcagcttaaaggctgcctcccagagacactatgtgtgcactcctggccaagtctggcctgcctcggatgctgccaaggccacctgtccttgtcactcactcctacggcagcctctgggtgccccttgtcagccctgctcagcagccccctctgtgagggcagggcctacgccttcagcaggcactgcttggtgagcggttgctggatggtgatggccagaggggcagacagcagccccaccctcacgccagcgtggggaaggaggaagcagccctgtcgtgctacaccgtccttgcatgaattcatccaagcctattgggacactgggcaggtcaacatcatgaagcagcacttccccgggcccctcatgatgaagcctaaaggcacaaaggcctagccctcccggagtggggttatcaaggagggcaagagacagagcccgaccctcaagagcatcagagacagtttataaaacaaagtttacatcttaacatgaagagcaggctctggagcacggagctgacctcattcatgctcagggcagccagcgagtcctgtggatggaaggacgaggcctggacccctctcgccatagagctgccctggtgacacgcccatgcccgacccagtggggcttcagggcagatactccctgctgcagggtgcccttctccaaatgaaatagggcagccggaggagggagaaggaaaacaatgcaagactcggggcccagggatgacagtgtccagtgaggcctgggaaaccttcgggctctcggggacaatgtgatagttccaaggatcactgactgccaccacctccccacttcatgctaataagatacatacactaagccttttgttgagcagagacagcctctggggagcagtaaagaaggggactcaccaggtaggtggcacaccacagggatgcccagtttcttgaggtcatcagcattcccgatgccagagagcatgagcagctgtggagagttgatggcacctccactcagaatcacctccttgctggcataagcctggaagaggtccagccaggtcactccctgaaaagccagctgttctcctgactcacagaccagcgccctactctagccagcaccatgagaacacagccttgggatgtagaatcctgtggcacacccgggacaggccccagagctaaggagaggaaactc

SEQ ID NO: 1148 - DNA, 7192 bp, Homo sapiens
agaataagggcagggaccgcggctcctacctcttggtgatccccttccccattccgcccccgccccaacgcccagcacagtgccctgcacacagtagtcgctcaataaatgttcgtggatgatgatgatgatgatgatgaaaaaaatgcagcatcaacggcagcagcaagcggaccacgcgaacgaggcaaactatgcaagaggcaccagacttcctctttctggtgaaggaccaacttctcagccgaatagctccaagcaaactgtcctgtcttggcaagctgcaatcgatgctgctagacaggccaaggctgcccaaactatgagcacctctgcacccccacctgtaggatctctctcccaaagaaaacgtcagcaatacgccaagagcaaaaaacagggtaactcgtccaacagccgacctgcccgcgcccttttctgtttatcactcaataaccccatccgaagagcctgcattagtatagtggaatggaaaccatttgacatatttatattattggctatttttgccaattgtgtggccttagctatttacatcccattccctgaagatgattctaattcaacaaatcataacttggaaaaagtagaatatgccttcctgattatttttacagtcgagacatttttgaagattatagcgtatggattattgctacatcctaatgcttatgttaggaatggatggaatttactggattttgttatagtaatagtaggattgtttagtgtaattttggaacaattaaccaaagaaacagaaggcgggaaccactcaagcggcaaatctggaggctttgatgtcaaagccctccgtgcctttcgagtgttgcgaccacttcgactagtgtcaggagtgcccagtttacaagttgtcctgaactccattataaaagccatggttcccctccttcacatagcccttttggtattatttgtaatcataatctatgctattataggattggaactttttattggaaaaatgcacaaaacatgtttttttgctgactcagatatcgtagctgaagaggacccagctccatgtgcgttctcagggaatggacgccagtgtactgccaatggcacggaatgtaggagtggctgggttggcccgaacggaggcatcaccaactttgataactttgcctttgccatgcttactgtgtttcagtgcatcaccatggagggctggacagacgtgctctactgggtaaatgatgcgataggatgggaatggccatgggtgtattttgttagtctgatcatccttggctcatttttcgtccttaacctggttcttggtgtccttagtggagaattctcaaaggaaagagagaaggcaaaagcacggggagatttccagaagctccgggagaagcagcagctggaggaggatctaaagggctacttggattggatcacccaagctgaggacatcgatccggagaatgaggaagaaggaggagaggaaggcaaacgaaatactagcatgcccaccagcgagactgagtctgtgaacacagagaacgtcagcggtgaaggcgagaaccgaggctgctgtggaagtctctggtgctggtggagacggagaggcgcggccaaggcggggccctctgggtgtcggcggtggggtcaagccatctcaaaatccaaactcagccgacgctggcgtcgctggaaccgattcaatcgcagaagatgtagggccgccgtgaagtctgtcacgttttactggctggttatcgtcctggtgtttctgaacaccttaaccatttcctctgagcactacaatcagccagattggttgacacagattcaagatattgccaacaaagtcctcttggctctgttcacctgcgagatgctggtaaaaatgtacagcttgggcctccaagcatatttcgtctctcttttcaaccggtttgattgcttcgtggtgtgtggtggaatcactgagacgatcttggtggaactggaaatcatgtctcccctggggatctctgtgtttcggtgtgtgcgcctcttaagaatcttcaaagtgaccaggcactggacttccctgagcaacttagtggcatccttattaaactccatgaagtccatcgcttcgctgttgcttctgctttttctcttcattatcatcttttccttgcttgggatgcagctgtttggcggcaagtttaattttgatgaaacgcaaaccaagcggagcacctttgacaatttccctcaagcacttctcacagtgttccagatcctgacaggcgaagactggaatgctgtgatgtacgatggcatcatggcttacgggggcccatcctcttcaggaatgatcgtctgcatctacttcatcatcctcttcatttgtggtaactatattctactgaatgtcttcttggccatcgctgtagacaatttggctgatgctgaaagtctgaacactgctcagaaagaagaagcggaagaaaaggagaggaaaaagattgccagaaaagagagcctagaaaataaaaagaacaacaaaccagaagtcaaccagatagccaacagtgacaacaaggttacaattgatgactatagagaagaggatgaagacaaggacccctatccgccttgcgatgtgccagtaggggaagaggaagaggaagaggaggaggatgaacctgaggttcctgccggaccccgtcctcgaaggatctcggagttgaacatgaaggaaaaaattgcccccatccctgaagggagcgctttcttcattcttagcaagaccaacccgatccgcgtaggctgccacaagctcatcaaccaccacatcttcaccaacctcatccttgtcttcatcatgctgagcagcgctgccctggccgcagaggaccccatccgcagccactccttccggaacacgatactgggttactttgactatgccttcacagccatctttactgttgagatcctgttgaagatgacaacttttggagctttcctccacaaaggggccttctgcaggaactacttcaatttgctggatatgctggtggttggggtgtctctggtgtcatttgggattcaatccagtgccatctccgttgtgaagattctgagggtcttaagggtcctgcgtcccctcagggccatcaacagagcaaaaggacttaagcacgtggtccagtgcgtcttcgtggccatccggaccatcggcaacatcatgatcgtcaccaccctcctgcagttcatgtttgcctgtatcggggtccagttgttcaaggggaagttctatcgctgtacggatgaagccaaaagtaaccctgaagaatgcaggggacttttcatcctctacaaggatggggatgttgacagtcctgtggtccgtgaacggatctggcaaaacagtgatttcaacttcgacaacgtcctctctgctatgatggcgctcttcacagtctccacgtttgagggctggcctgcgttgctgtataaagccatcgactcgaatggagagaacatcggcccaatctacaaccaccgcgtggagatctccatcttcttcatcatctacatcatcattgtagctttcttcatgatgaacatctttgtgggctttgtcatcgttacatttcaggaacaaggagaaaaagagtataagaactgtgagctggacaaaaatcagcgtcagtgtgttgaatacgccttgaaagcacgtcccttgcggagatacatccccaaaaacccctaccagtacaagttctggtacgtggtgaactcttcgcctttcgaatacatgatgtttgtcctcatcatgctcaacacactctgcttggccatgcagcactacgagcagtccaagatgttcaatgatgccatggacattctgaacatggtcttcaccggggtgttcaccgtcgagatggttttgaaagtcatcgcatttaagcctaaggggtattttagtgacgcctggaacacgtttgactccctcatcgtaatcggcagcattatagacgtggccctcagcgaagcagacccaactgaaagtgaaaatgtccctgtcccaactgctacacctgggaactctgaagagagcaatagaatctccatcacctttttccgtcttttccgagtgatgcgattggtgaagcttctcagcaggggggaaggcatccggacattgctgtggacttttattaagtcctttcaggcgctcccgtatgtggccctcctcatagccatgctgttcttcatctatgcggtcattggcatgcagatgtttgggaaagttgccatgagagataacaaccagatcaataggaacaataacttccagacgtttccccaggcggtgctgctgctcttcaggtgtgcaacaggtgaggcctggcaggagatcatgctggcctgtctcccagggaagctctgtgaccctgagtcagattacaaccccggggaggagtatacatgtgggagcaactttgccattgtctatttcatcagtttttacatgctctgtgcatttctgatcatcaatctgtttgtggctgtcatcatggataatttcgactatctgacccgggactggtctattttggggcctcaccatttagatgaattcaaaagaatatggtcagaatatgaccctgaggcaaagggaaggataaaacaccttgatgtggtcactctgcttcgacgcatccagcctcccctggggtttgggaagttatgtccacacagggtagcgtgcaagagattagttgccatgaacatgcctctcaacagtgacgggacagtcatgtttaatgcaaccctgtttgctttggttcgaacggctcttaagatcaagaccgaagggaacctggagcaagctaatgaagaacttcgggctgtgataaagaaaatttggaagaaaaccagcatgaaattacttgaccaagttgtccctccagctggtgatgatgaggtaaccgtggggaagttctatgccactttcctgatacaggactactttaggaaattcaagaaacggaaagaacaaggactggtgggaaagtaccctgcgaagaacaccacaattgccctacaggcgggattaaggacactgcatgacattgggccagaaatccggcgtgctatatcgtgtgatttgcaagatgacgagcctgaggaaacaaaacgagaagaagaagatgatgtgttcaaaagaaatggtgccctgcttggaaaccatgtcaatcatgttaatagtgataggagagattcccttcagcagaccaataccacccaccgtcccctgcatgtccaaaggccttcaattccacctgcaagtgatactgagaaaccgctgtttcctccagcaggaaattcggtgtgtcataaccatcataaccataattccataggaaagcaagttcccacctcaacaaatgccaatctcaataatgccaatatgtccaaagctgcccatggaaagcggcccagcattgggaaccttgagcatgtgtctgaaaatgggcatcattcttcccacaagcatgaccgggagcctcagagaaggtccagtgtgaaaagaacccgctattatgaaacttacattaggtccgactcaggagatgaacagctcccaactatttgccgggaagacccagagatacatggctatttcagggacccccactgcttgggggagcaggagtatttcagtagtgaggaatgctacgaggatgacagctcgcccacctggagcaggcaaaactatggctactacagcagatacccaggcagaaacatcgactctgagaggccccgaggctaccatcatccccaaggattcttggaggacgatgactcgcccgtttgctatgattcacggagatctccaaggagacgcctactacctcccaccccagcatcccaccggagatcctccttcaactttgagtgcctgcgccggcagagcagccaggaagaggtcccgtcgtctcccatcttcccccatcgcacggccctgcctctgcatctaatgcagcaacagatcatggcagttgccggcctagattcaagtaaagcccagaagtactcaccgagtcactcgacccggtcgtgggccacccctccagcaacccctccctaccgggactggacaccgtgctacacccccctgatccaagtggagcagtcagaggccctggaccaggtgaacggcagcctgccgtccctgcaccgcagctcctggtacacagacgagcccgacatctcctaccggactttcacaccagccagcctgactgtccccagcagcttccggaacaaaaacagcgacaagcagaggagtgcggacagcttggtggaggcagtcctgatatccgaaggcttgggacgctatgcaagggacccaaaatttgtgtcagcaacaaaacacgaaatcgctgatgcctgtgacctcaccatcgacgagatggagagtgcagccagcaccctgcttaatgggaacgtgcgtccccgagccaacggggatgtgggccccctctcacaccggcaggactatgagctacaggactttggtcctggctacagcgacgaagagccagaccctgggagggatgaggaggacctggcggatgaaatgatatgcatcaccaccttgtagcccccagcgaggggcagactggctctggcctcaggtggggcgcaggagagccaggggaaaagtgcctcatagttaggaaagtttaggcactagttgggagtaatattcaattaattagacttttgtataagagatgtcatgcctcaagaaagccataaacctggtaggaacaggtcccaagcggttgagcctggcagagtaccatgcgctcggccccagctgcaggaaacagcaggccccgccctctcacagaggatgggtgaggaggccagacctgccctgccccattgtccagatgggcactgctgtggagtctgcttctcccatgtaccagggcaccaggcccacccaactgaaggcatggcggcggggtgcaggggaaagttaaaggtgatgacgatcatcacacctgtgtcgttacctcagccatcggtctagcatatcagtcactgggcccaacatatccatttttaaaccctttcccccaaatacactgcgtcctggttcctgtttagctgttctgaaata

SEQ ID NO: 1149 - protein, 2181 aa, Homo sapiens
MMMMMMMKKMQHQRQQQADHANEANYARGTRLPLSGEGPTSQPNSSKQTVLSWQAAIDAARQAKAAQTMSTSAPPPVGSLSQRKRQQYAKSKKQGNSSNSRPARALFCLSLNNPIRRACISIVEWKPFDIFILLAIFANCVALAIYIPFPEDDSNSTNHNLEKVEYAFLIIFTVETFLKIIAYGLLLHPNAYVRNGWNLLDFVIVIVGLFSVILEQLTKETEGGNHSSGKSGGFDVKALRAFRVLRPLRLVSGVPSLQVVLNSIIKAMVPLLHIALLVLFVIIIYAIIGLELFIGKMHKTCFFADSDIVAEEDPAPCAFSGNGRQCTANGTECRSGWVGPNGGITNFDNFAFAMLTVFQCITMEGWTDVLYWVNDAIGWEWPWVYFVSLIILGSFFVLNLVLGVLSGEFSKEREKAKARGDFQKLREKQQLEEDLKGYLDWITQAEDIDPENEEEGGEEGKRNTSMPTSETESVNTENVSGEGENRGCCGSLWCWWRRRGAAKAGPSGCRRWGQAISKSKLSRRWRRWNRFNRRRCRAAVKSVTFYWLVIVLVFLNTLTISSEHYNQPDWLTQIQDIANKVLLALFTCEMLVKMYSLGLQAYFVSLFNRFDCFVVCGGITETILVELEIMSPLGISVFRCVRLLRIFKVTRHWTSLSNLVASLLNSMKSIASLLLLLFLFIIIFSLLGMQLFGGKFNFDETQTKRSTFDNFPQALLTVFQILTGEDWNAVMYDGIMAYGGPSSSGMIVCIYFIILFICGNYILLNVFLAIAVDNLADAESLNTAQKEEAEEKERKKIARKESLENKKNNKPEVNQIANSDNKVTIDDYREEDEDKDPYPPCDVPVGEEEEEEEEDEPEVPAGPRPRRISELNMKEKIAPIPEGSAFFILSKTNPIRVGCHKLINHHIFTNLILVFIMLSSAALAAEDPIRSHSFRNTILGYFDYAFTAIFTVEILLKMTTFGAFLHKGAFCRNYFNLLDMLVVGVSLVSFGIQSSAISVVKILRVLRVLRPLRAINRAKGLKHVVQCVFVAIRTIGNIMIVTTLLQFMFACIGVQLFKGKFYRCTDEAKSNPEECRGLFILYKDGDVDSPVVRERIWQNSDFNFDNVLSAMMALFTVSTFEGWPALLYKAIDSNGENIGPIYNHRVEISIFFIIYIIIVAFFMMNIFVGFVIVTFQEQGEKEYKNCELDKNQRQCVEYALKARPLRRYIPKNPYQYKFWYVVNSSPFEYMMFVLIMLNTLCLAMQHYEQSKMFNDAMDILNMVFTGVFTVEMVLKVIAFKPKGYFSDAWNTFDSLIVIGSIIDVALSEADPTESENVPVPTATPGNSEESNRISITFFRLFRVMRLVKLLSRGEGIRTLLWTFIKSFQALPYVALLIAMLFFIYAVIGMQMFGKVAMRDNNQINRNNNFQTFPQAVLLLFRCATGEAWQEIMLACLPGKLCDPESDYNPGEEYTCGSNFAIVYFISFYMLCAFLIINLFVAVIMDNFDYLTRDWSILGPHHLDEFKRIWSEYDPEAKGRIKHLDVVTLLRRIQPPLGFGKLCPHRVACKRLVAMNMPLNSDGTVMFNATLFALVRTALKIKTEGNLEQANEELRAVIKKIWKKTSMKLLDQVVPPAGDDEVTVGKFYATFLIQDYFRKFKKRKEQGLVGKYPAKNTTIALQAGLRTLHDIGPEIRRAISCDLQDDEPEETKREEEDDVFKRNGALLGNHVNHVNSDRRDSLQQTNTTHRPLHVQRPSIPPASDTEKPLFPPAGNSVCHNHHNHNSIGKQVPTSTNANLNNANMSKAAHGKRPSIGNLEHVSENGHHSSHKHDREPQRRSSVKRTRYYETYIRSDSGDEQLPTICREDPEIHGYFRDPHCLGEQEYFSSEECYEDDSSPTWSRQNYGYYSRYPGRNIDSERPRGYHHPQGFLEDDDSPVCYDSRRSPRRRLLPPTPASHRRSSFNFECLRRQSSQEEVPSSPIFPHRTALPLHLMQQQIMAVAGLDSSKAQKYSPSHSTRSWATPPATPPYRDWTPCYTPLIQVEQSEALDQVNGSLPSLHRSSWYTDEPDISYRTFTPASLTVPSSFRNKNSDKQRSADSLVEAVLISEGLGRYARDPKFVSATKHEIADACDLTIDEMESAASTLLNGNVRPRANGDVGPLSHRQDYELQDFGPGYSDEEPDPGRDEEDLADEMICITTL

SEQ ID NO: 1150 - DNA, 247544 bp, Mus musculus
  misc_feature (1)...(247544): n = A,T,C or G
acacatacatgtatgttctctctctctcacgtatgctctctctctcataccaaatgaataagggtaataaaactattgttctagcaagtccttagtgtgcatgacataacacctggcttgaaatctgatcctagactgtgctgcgctcctttggaaagttaagtttttaacctactgtacttcacttctgttgtggctgtaactgaggtaactgactttggcgatggttgacttttgtgctgtgaagaacttctgaaactcacaaggcctctgctttgctttagagaccgtgtctcacgtagcccagaacagcctagaactttctatacagccggggatcaccttaaacttctgctcctcctgcgtgctgggattgcaggacgctccaccaggctggggttatagggtaccgaggataaagtgtgggcttcgttcccgccccacaagaactcttccagctacaccatgttctcagcctgtcgcacgctctgtcgtatggaataattatactacttccttaaaaaacaaaaacacttaatctttctttattttaaggttgacttagaaaacttggaaggatctatatttgctttgagttttaatcacctataatctcacaatatttactgttagagttctggaacattttgttttggtcttgtttagtttcatgcattctggaacagagtgggctcagtggttttgcattctcatacgactatttttctaatttttattgtttggggacttgaaagcaaacctagagccaagcctctgagtgctaagctgggtatggcgggctgtgcctgtagtcccggtgtttgggaaactggggcatgagatcagcttgaggctgggagttctagggcagtcttagacgtacagtgacgttgctgtctcctaaacaagaaggccaactatagtacaaaggccttagctcagtcctcagcactgagggtgggcctggacaatttgaagggtctacttgatttagtagaggatcccgagacataggtcagagaagctgtgaactgtatgtggctgtctttcaactctcctgcggtcttgctgatctcttcacaattgatctcttgccaattgcttcaccatcatccttgccttttgtgctggaagctctttgctctagattggctccttgtccaccatctggcttccggccaccctccaaggagccgtctctaggtactcataaacacataggttagtgacttatcacctggatgtcattaaaattcctaaagtgaaatgcttggatcaaaaaactcgtagtaaatcttgcgaaattgttttctgaagaggcacttggtactagttctctagggtggtgtaaaagaaatgggccccaggtagcactgaaaagccaagtttgttttatttagcctacagatttagttttattattagggtgtgagagttttgcccaaatgtatatatgtgtatgatgtgaatttttggttcaggcagaggtcaaaagagggtgttggatctccaggaactggagggacagagagttggcaagggatgagggtgctggggtcaatatctgtccttgggaagagcagccagtgtttataacccctgatcgaacaggcatggtcacatgacctgcgcactcttttggaaggtgaaatgagtggtgtcaatggtcatccactggtgaggacaatgttgtccattgaaatataaaatgacacaaactgcataattttagattttagtaagatataagaacagaaacaaagcagaacagaacaaaacaaaacaaaacaccctgtgtgtctaaattttatcatttaaatctacagtcagtgtaaaaaaaaatcaggtttgggaggcttcaactgtactcaagggctatggtctccttcccgtgtccccttagctttccctttcttatgggagataaacaactcagagtggggcaggggagcagcagggcatcgggatcctaccctgtcaacaacactggcagacagacttccaatggtgaggcagccgatttgggatattcacgtgcttgccttggtcacaggttgaggtgttttgactggtgtgtggccccagtgccagaaagggcccttaagcaaagagatgttaatgagccggatactttttcaactcttgaccctctcagagacaaaaaaaccgggccggaaagcgacagtttctgctacagtagggtgagcaggctgcaaagagatcctattatttcctaagcctctagagaccttgatgcttccagattccttcacatcactcacctacgagctcgtctgtctcatcgtgatttcgggttttaaaagctggatgctatcccgttgtgtaaatgtaccacaccttagccatccactcctctgttgacggacaggcaggtcttttccggtttctggctaatgaggtacagggcagcagcgatcgtttgggcgccctagcgtctctgcccgcgatcttgaggtggatctagctacagctccccgaggagcgtccacacagattcccacagtggctgtatggcttggctcgcccacccgcaaaggctgacgtttcctcttgctccagatcccttgtcagcatgagctgtcatgtgctttattgaccttggctgctctgactgaagatggaatctcggagcagctttcatttgcatttccctacctccccgccttaattcttacacaagcagttaatccgaggtcgtctgtagccctcttgacaacaattcccattgcttgctcccccgacccccatcttatgaaaagagtagctgaggtggccagtccatttttgcttctgttgttctttgtttccgtttctttctatccacctctggtctataaaacccatctcttctgttgagaccatgggaacatggactctaatttatggaaaaataaaggcaagtaagacgtctaactggtaatttcagcctttaacacaggtaagagttggttggccctgagagctggcggaccacttactccctgccattcaggtttccaagtgggacatttagccaagggacactcttgactattcctcttcccttttacattccagccaccggaagcgtgtagaaggaggagctggggggtcttttgggaggcctttgctggtgactggatgactgcagtttattttagggtcaaatatcattaagattcctgtcctcagggcagagcaagacttaatgtatttcaggagtgaattagcttctgcttccctcgcaaccggttctgtatttaggcaggaggaaaaggtatttattgttgatatctttaaacatcccaccaaagtatcaaaccattgatgtaggtcacagcaggtggaactctagaacagtgacaacaagttaaccagagagagttctgaaggagaccttcatttttttcattagcatttagcacatacttaacaggggtattcatgactttgagtctcaaacatctctacaaataatctcaaaggttagtataagatagcatctgcattttgtctctaaattttggaattaccaaagatatccagatttatcaaagctaggttggttactctttcctggagtgataaccatgtgtttccagttacttaaactagggatgtagaacggcaccttcttctgcttgctctgctttcagaacatttccaaaagtatttaacgagtcctgactaatttctaacgacacgatcctttgagttcccagaagtgactcctgttggttgtcctctctggtcccttctcctggtctactctagcctctcattgtactttcctatctgctacactttattgggtcattctctattcttggatccgtatttcacacttatgtcaattttttctttcagaaatagagagacagtggttattgttattcacagaatacagcgggaagaacagaagttcaaaaccatccttggttacacaggaaactcggttatagattgaggctagccagagctatgtgagacctgtctcaacccctctccccaagtctcctaagagaatagaaactcccaaccaaaaccctttttcttggggctggagatgtagggatggatatgtagctcagttggagtgcttcgtctatcattcataaagctctgtgagtttgatctccagctctgcacaaagccagatgtggtaaggcacacctgttgtcccagcaatcagaagacagagacaccagaagttcaaggcaatcttcagatacataacaaggccaaggctagcctaggatttaagaaacctagtctcaaattaaataaaaattaaaaagagagaatgacgttcaacttcttaggattcagagccccataaaccaataacttgctcccaagcatctgtttcaaccaggcagggtgacagtgtagcatcttagaatcttgtttgttagactttctctggacactggccttttctggccccttggaaccatgaacatctggtgacattctgaattttcaagctctttattaatttttctgcaccacttccatcaagccatctctgtagaaatctttattaatgttctccaacatttcttcttcttccattattattattatgatgatgatgatgatgatgtgctggggatggaacccaaggccctctacctcctaggcaaaggtagcaagagctacaccgagctgtgcctctggcttgcctttccttcagtaactacacatatcctgtaatggctgttaagcacatagaattctttttatcagccatgtctgcatattaggatcacctagaagaccttaattaccactttcctcctggaaggagcttggtcatttgatttgaagtggatgctgggatacccttccccacttgcttacctaaaaaagactgagttgaaaatcttcctcagcctcaagctgggatcatcatgaggttaccacagagcaaagcaactggaccaagtgaccttggacagaaactcagggtgtctgagccaaaacagacctttgagctgacttctgtggtttgtttgtttttcctcagagcaatgggtctcttagtgtgctatgttttctgttatttcattgcatggtatttggaacagctctgtaaaaacttatattttatttattgtgtttctgtggggtgtgtgtgtgtgtgtgcatgtgtgtcattgtgcacacgtggaactcagacgacaacttgtgtgagatagtgttcccctttgctgtgcagggactaggaattgaactccggttgtctggcttggtggcaactgccttcatccactaagccatctcggtggcccaagtttggtctatgttgtgattataaaaagataaagagatatgattatgttctatgggggtgtggcgagggatggggggagggggtgcctcagtgggcccatgccaagccatcccttccccctgagggaccagccacatgatggtatagtatagaatagagttattcagggcttggggaggggaattaaaagagtagtagaggcagagaaaggcagagagagtgagagagtagagaagtagaggccagccatgactacatgaagagggggaggggcgggagtgaggagagagggggagcaaggggcaaaaggcaagagtataagattaagggggggggggcaaacagccccttctatagtgggccaggcctacctggctgttgccaggtaactgtgggggtagagtccagacagaatacagcctatgtgtgtgtggtacacacagaaccacaactccacccacccacatttaaaaaatgtcttatgtatttttaaaacttaaactttacacataggaatgttttgcctttgtgtgtgtacaccacattcatgcccagttccagcagagatcaaaagagagtctagaactggggttaaagatggctgtgagccaacatgtaggtgcatggaatggaaccctggtcctctgatgaaacgtgtgcatttaaccactgagccatctctccagctccctagcatggtatcgtgaacacgttccctcacgttgttaacacacatgcatgatctgttctttacgaagtgccaacattttgtgatatggacgtgccacgtctgatgcgcccctcacgggcatgtggtcttcccctcacttctgagcaacgctgctgtagtgtgagtgctggagcagtgagctttcccgctgacatgctctttcatttcccttggctgtgttcccagcaggggagctgctgagtcactcctgactccagcttctgaaggacattcagcctgcctgccttagtctctaccagctacaccactctgtcagtgatgtgggctgctcagtttcttctgctccgccacttgttattgtttctgtttttactcataatgctggattacttcaagccagtaaacaaccgcaaatagaggcccttcttctacctttgcatgctagtgtttggccaaactgtagtacaaaggaggcactcactaaatgaaaacacacaggctctctctctacacacccacacacacccgcacacatggtacacatacacatgtccatattttttgtggtgctgaggattcaacccagggcctcacgctaagcaatcactcaccaagaactataccccagtccccaggatttgtaaatcccagcccttctcatttgtacactgccttcagaatgcagtgaggagctgagagggctcacagtgacctggcaaaaagcagggaatcagaatctcattgcagaccagagaaaagtgagagcaaggaaggccagagattaaggaagaatggaaaccccattcccataatgcccctctctttactgagacaatggtgcttagtaagtcttctaaatgtctcattagttaattaatgttcagaaaagaatgttaagaagtttcaaaatagcttagtttaaaaaatgaaaagtcagcatgctactccctagacactgaagggactaagctccttggtggcttggagcctccaaatcgtagtcccagcagggtcccctgtcacaggggatggggcagacacaaggcaagtcactagatttctaacttcgcaaactaattttcaggctttgaagtagaactggcagacaattaaacacctgggttagacaatgcaggacattttaaagagcaccagaaattaggtaaggcctttaggtaaggactgttgatttttatgtatgccttatctgagaaaccgcagagaaggaggccactggatggtcagctctgcattccaatggaaacacttaccttcctgcagtgggaagtctgaaaacacgcatggaatgccccaacatgccatgtctcaaacttcattcagttcaaaaccatcaacattttgctaatttatgttcctgagttttaattaataattaattaattttcaaaagacaggtttgttcaggttggtcctagagttcttaactcaagacattcttctgttgcctcagcctcctgagtagctgggattttatatctacctattatgtatctgtataattgtgtgtgtgtgtgtgtgtaagcttgttgctactcaaatactatctactttctatgctttgtttgaaacaggatttctaattgcactggaacttgtgaattagggtaagggcctcaggaatccttgccttccttcccatgagggaatgagtgccaccatgcctgccttttggagagtgggaggaatttggcccattgtgcttgtaaggcaaacagtctacctactgggatgtcctcccagctcaaaaactcatttataacgggcatgttcccagcacctgggaggcagatgaagggagagatcaggggtcaaggccatccttggttactggtttatggaattaagaggctaccctgggacacatgagaccctgtttcaattcttctctctgaaaccgtctctgcatgcatccagttaaacctagaactccctaggtaccccaccgatctcgaactccatcttttcctgcctcggactcgagggctgctgtctggctaattactttatctatactgatttaattttgctccctgagacagggcctctcatgtatgtctggctggtgaggaactctctgtcccatcaaagatggcctggagttgttgtttctcctgtctccacttccaaactaatgggattaaagctgtgggcactacatatgacttgacttctaaacaactgcttatttataccaagacactctgcacaaactattgctatacacttaaataagcgcatatgggaaatgaccaaagaaagctaagttagttgacttttatttttatttatttatttatttatttattcatttattcatttagattttttttttggttttttgagatagggtttctctgtatagctctggctgtcctggaactcactttgtagactaggctggcctcgaactcagaaatctgcctgcctctgcctcccgagtgctgggattaaaagcatgggccaccatgcccggcttttttttttttttttttttttttttaattgtcaaccagacacaacctagagtcaccagaaaattaggaacttcaagtaaagaactgcccagatgggcttggctgatggcagctgtgagagaatgacccattggagatggcatgaggacccagcccactgcaggctggagtcagcaccaacaggccaacagggttgttgttgtttcagctctgggcccgacttctctccgtgatagactgtttattacctgcaagtgtaagcctgaaataaactctttcttatccaagctgcttctggtcagagtattttctcacagcaaaaggaccggtgaaattgtcactagggccatgaattcgaaaccgctcttctttccttacccagcgctgaagtgaaccaaagcagcagaggcagttaacacggccacgccagaaccctgggcttgtgaacactagtccacgagccaggacccataccttcctcactgtgtcggggcaccctggcacttcttatgccagcttgagtacaagtcagatttcatcatcactaaccttaagatctcggacaagctagatcttttgagtctgaatttattcagtaaaatagtaataaccatttcgaaaagtaaattagaagcggagtaggcttatagaaaggcacagcaaggtgtcctgtaacatcggttccctttgccacggatcctctgggagcctctcagggctccgtgaaagaaacatgccaggcagcgtattatctgatttcccttacctaatctaagaggacagccaactgcttacacaggtccgccatgccaagcaatgtaggaaaggtcaagaagccgtccgaaatggtagcactctattcatctccccaaatccttgtgtcctaatatcgggtggcctgacggtcttcacggctttaaggtctgcaaaggcaatctgataaaccttgctgttgttccaggtccgactcttggcctgcaggtggaacaatctcccacagcaccctatttggtcctgatgagggcagcatgccaggggaccgcaggcaaagccaggcggctttcaccagatctccaggagcgcaaagcctagggggcgtttccgagcgcgggggcgggcacagccggtaccgcccccgccaccttcagggtggtgcttgggtgctgatcttaaacttcggcaaagtttgcaacgggtctcaagcacgtgcggcttccccgcccggctccgcgttccccgagccgcccccggtcacctgcgcgcggttggtctctgtcgtttccccagcggccgtccccctgcgctctcacgcgacacgcttctcccaggctcgaggaggcggcggcgacagcgcgtagcgggcgccccgaggagccccgagaggcggggtcagggcgggccggcgcttggttcccggaagccgctgcttgcctgcgaggctccggccgaggccggagctcgagcatcctcacccgcgcttcccggagccgccgcccggccgcgcgcaccgcgggcgagatgctgccggtgcacaccgaggtgaaacccaacccgctgcaggacgccaacctctgctcgcgcgtgttcttctggtgagtgccgggtccgggcccgttcctccgtccacgagatgctccgcgtcggcttagccgcgtgtccgatgctcagcgccggtccctgatggtcggaggatgcgtttcctgcacagccttacactccgggctccttgtcgcgcgtgcgccacgcggcctgcggtccccgcccgcaccccacgcccgtgccgctctcctccaggaggggcacgcggggaccggtggcagacgcaggtggcgcccacccgaaaccgtggggatccatgggaggtgcgggggtgccctggagggcgggctctgtatgcccaccttcgctagcttcccatcccggctcagggcttgcacaactccctcacccaaactgcacctctttatttctctttaagcagcagtgaacagatgggcttatcaaaaagcagctgaagttagagttctgggcgaacgccaaactctgttgtccccatggccttctgaaacaccttaccagacatctttcaggtccattgattgcctgtgtgtgtgtgtgtgtgtgtgtgtgtgtgtgtgtaaggaagtttaacttctaggatcccgtctctccttctggcccctctgtgtgtgtcctagtacctaagtatggctgtgagttaaaaggtcactttattacgatgttttatttagttacgaatggggacactactcttgagcaagatcaacatgatgttttcctcttgacagaaacgcagccatagtggagtacattttcccctgttagatggacttttcatttctgcctttgatggccatatccctcttgggaatgagtttcggaagcctgttgggggtcttaccaagatgtgttcagagacaggagtcaaggtttccatgcctaaaaccactgatgggttccctgatctggtctccgccccacccctctttttgtaggaaacaggtgaagaggtttagatagatgacattcctaagtagttttccgcctagtagcctgggctggctagtacacgcttggctaacaagaatagtttttattccttgacctccgccatttcatcttcctcacgttctaatgttacctttttaaaatgtgaaaacctagggagcttcagagtcatttactactgtttttaactgctgatgcagtgtgtgcaggatccgattttggacactcggtcaagaggagcttgcgggaagaaggaatgtggtgaaatgaatttaaaaaaaaaatacataactcagagcgggtgggctgtcttggtctcccgagcttttggcaatacacagacctcctgatgattttcctgtgagcggactttcagaatggaggtgaagcgagagctgggtgtgggtggcacatacctccagtccctgtctcttggaaggctaaggtgggaggatgacttgagcagctatggagctgagaccagctaggataaggtagcaaggcacaatcggctgttgtttgtttgcttgagacagcctcaccctgtagcacaggctggtctggaagtcctcgaatgcacagcaatcttccttacagcctcggtttccacagtgctgggattataggtatgagccaccacatctgtcaatacacggtcttaaactatgtacggaatagctgagtgtggtatcacagcctttaagctgtcaataccagcactgagtaggcagaggcaggtggacccctgagttcgaggccaacctggtctatattgtgttacagtcaggcttatagatagactttaaaataaaaaagggtaattattttacattgctgtctggggtgagtcccatttctacttcccagttggtgagaaattagctattgcctctagtttatcccttgtgagggggctcaagctgaggtactttgactaacccgtctaggatggcaaagctactggcgtccagcaggatccaaacctggctctcaggaaccactgtactttgcagttggtcctcccatgcatgaagaaggattgctcccgttcttacagcagtttctcaaggatgctattacaattcctgtcgttgaagatgcgtgtgaagcatctttggtcactatggtatcagctctcacagcaggatagtcagaagggcagcatcagcatcacctgggagcttatgggaagatgcaggatctccagtgtccctgcagactgacccagcacagccagaagcatgggggtccatgcttttcacaggggcccgagtgatgctgacgaaggctgaggctggcccactggactatggcgcacctcctgttagccttggctttccagtgttacactttgcaggagggctgtgacttggtgaagtcacccgtggcctgcttaaccagtgtgtcatttctctttctctcttgcagctgccttgctgcagatgggaaaccctcctgcaagcccggattttttttaccttctttgtggggcgtttgtttttccgcccactctgtgtctgttttctagactcttgagttggtagctgcccagccagatgatgacagcccatgcaataagccttcctaggatttaggtgaaattgtaatacagtttggacgtgggctgtcaatcagcctaggacaccggctggtattgtggctgtctcttgcacgcatgtgttctttcagtgcacacgttggcaggagcacacggacattaagtaaaactgtaacctgtcatggatcctttagctgatatggtggactttacactgttgcctttaagacatgatatttttctgagtgtaattttccaggccttttgctgttgctgaacacagtgcattcaacagttacatagtatgtgtccatggccgtatcttttggtgtcctctcttccctttctcaggctgttggtgttggggattggaataaggcactgtatagattaaacatgcacgctaccactgcctatacctccagcctcatccagagctctctttctctctacctcccaggatcatctagattccctgtgcatattttttttagctattgtgttaatgacaaaggatgctagggtttcttttttgcagctgctgtaaaataggcaccagttttgttttgtttttttgttttctttttctttttcttttttagatttatttatttattatatgtaagtacactgtagctgtcttcagacacttcagaagagggagtcagatcttgttacagatggttgtgagccaccatgtggttgctgggatttgaactccagaccttcggaagagcagtcgggtgctcttacccactgaaccatctcaccagcccttgttttctttttcaacacagcacattttcctaccactgtttattgagcagtttgtcatacccgtcattagaaacaaatggtataacttgtgaaatactgtgtccagccaggtcgtggctgactgctcctctttagttctagtaaccctggagttagaggcaggtggatctctgtgagtttgaggccagcctggtctacagagagagctccaggacagccagggctattacacagagaaaacctgtctggaaaaaaaacaaacgaatgaatgaatggaatactgtgtctagccggctatgagaatgtccaagccccagtctctcccaagggtgtccttctccctgctgccccctggtgttttcaccaacgtccaggaagacctgtgggtgtcctctgtattcctaggccaggcctcctcctacccaggaggtcttgggattgcagcagcagatggaaggtaaccagagaggcgctttcccagggtgccagtgtcaagggactccaggggactgatgcatctggccccagagagtagttaagcccttgttctcctatagctgactgtgtctctgctcagagatgtcgtgctgcaaagccatgtgacaggacagactctctggggactgggctgagaacaagcttgtgacttgcagatgaaatgcagatggcttaggaaggttggctgaggggcactccatcacggcacagaagtgccacgtatttatttattcattttattctgtgagacaggatcattttttagcccaagctttgggtagagaactctcccagctcactgtcttgagtgctaggattataggtgtgagccatatcttgcttggtagtgtttaattttaaccagaggcattttggtaccatattttgagtatttttattatcacacttgcacactcccccaccacactcatacattacacacatatgtataaacacacacatgcagaaatacacatacacatgagcacacaaacatacacacatgagtataaaaacactcatacacccatgagcatacactcacaataccacacatatgcacatgcacacacatatattnnnnnnnnnnnnnnnnnnnnnnnnnnnnnnnnnnnnnnncacacatatatttgccccccccccgccgcgcccccatgcacagacaacattcccttttacatacaacacaggtacacatatacatggacacatactatacacatgcataactcaacccacaacctataacacacacacacacacacacacacacacacacacacatgcacacactcctactatggcacctgtgtggaagtcagaggaaatctctctgtctgcttagtgagtctggggttgaacctcaaggaagtcatcagacttggtggcaagcacctttatctgctgagccatctcatggccttgctggtattaggcagagtgccaggtttctggaatgaacaaacaaacaaacaaacaaacaaaaaaaccctcctgcccgccagagtagaaaggaaagttttagactcacttaaagattagccttttaaagacatcttcatattgcgtaacacaagaagaccactggatgcagaagtcatcagagtgggagtttcatgcctggatagtaaatgtcatatttacctgcctcagtaatagtccttggacatggttttgaaagtgtaggccatgggtctcttgtagcgtccccgctgtgagtcctcaggaactctggccctagtgagtctgggtgggtcctggggatctcttttgctggctactgcttctaatatcctcggaggacaccttgagaggccgtgttgggaccttgagctttaacaatggtgatcactagcacatatacattttgttccattcagcttgttatcttccagaagtttaaccctcagtctctcaggcagacattatcacccttctttaggggaggcagattgaggtccggtccggagggggttgggaaatgcctcagtaacctcgtagcttggaggtgggtgtgtcacagctgagacgctatctggatcatcaaaacatgtcataggtgtgccccatcgaaaacagaggcactcgctcagtatctgtctacctgctgggctctgctgggctggtagaaacgttggctggctggatgaatgtgtgtgtgtgtgtgtgtgtgtgtgtgtgtgtgtgtgtgtgtgtgtgtctgctgacttgatcaagcaggcctcttggttgttagtgaatgagtttgtttttcacatgtgtgttcgtcttcagcatgttttctcctgtgctggcttgttttatgtcaacctgactgacacatgttgtagtcatcagagacgagggagtcccagtagagaaaacgcctccattaaggtcaggctgtgggctaggctatagggcattttcttcattagtgatgggcaggggagagcccagcccattgtgggtgctgctatccctaggctgatggtcctgggttctataggaaagcagactgagcaagccagtaagcagcatttccccccatggcctctgcatcagcttctgcctccaggttcctgccctgtgtgagttcctgtcctgacttcttcagtgccgaacagtgatgtggaagcataaactaaacacaccccttcctctccaaattgcttttggtttcatgtttcatcacagcagtagaaaccctgactaggacacctcccgtccatctgtaaggttgaattgctatttggttgttagcaccatcgtctgtctagttattaaggcataaactctccggtcatccttgtttaaaccattacccctggcatcagattctacggttggactttaggcatgcctgtggagccgtttcatccaccgattcattcacacgctcaccaaatgttgttgaggatcctcagagacactcctcaagcctggctgtggctttagttttttctttttaaaaattagatggaaggaaaatcactgtagaacaaactggggtcatcctgctcaaaaacctccccggcctcctcccgttgctctcaagaacaaaccataattcacattcagttctgtgactccagatggggctgtgacccacagttcagctgtggcttagagcaggctctgccagtcactttctgcagagggtacacggtgcgtccttcaggctctgctgcgtgcggtctctcttgcagcgaaggactcgtcttatttgtacgtgtcatcctcttatttttgatcattgagccgggaggtctgctgccagatttatttcaggacccaacaggaagaggttccagggtgtctccgagggcaggatggagatgctgccgagtgaggtggtgaagccccgagaggaacggtcagagcgcatggttaacagaatgtgcagatccgtggaacagttcactggctgctcagtctacagggtttgtcctcacataatatcctgcttcatctctgtttttgttcgtggcattgatatcagagctgagcagcttgttgctgccattcaaaggttttagttggaggactgactagaaaggaacaggtttggagaatgtcccccaaggtgtggcaagccacttgccagcactgtatgggagattacattttctacgagtgtcagaagagaccacatcacctgccccgtgggagtccagaggtatcgggtctccgggttggtcattccctatgaggaaagtggttggcgtgttggcaggatttactttgtacaaatagaggctggttgttggtgttgggttgcagatcctcagattgtttccgtctgttgtctactgatgggaattatttcttcttctctaggtttttgagatagggtcttatctgcccaggctggccttgagctaccttgtggtattaccgaggtctactacgcccagcgggtggaaattatttctctgaaggctaccagcctgttgctacatttcctttaacgttttggtggcagtgggattgaaccgagggcttcacataagctaatgacacgctctgtaccaaactgcagctccagccccccattaagttctttctagttgacactggcagcccgctctgaggctgaactgcctgggtagccaaaacaaccataacaaaaggaaactgaagaaaaacccaaggctagcacatccctaggccagtttgaatcctaattttgggaagcatcacttaggcgtaaaataattttaaaaggctccttcagtttttgatggacagcgaaagccaagaaccacaggctacagcctcccctgagtcagtgagcttctctgagtcaccctcaccccccattccatctcagctccctctctcccaggacttgcccacctcaaggtgtgggggctgtggctgcgcagagcttagccctgtgttgctcagcaggtggcagtggggggcagcagtccctgtcccaggggtcttggggatggtgggctatttgatccttataggaacattttgtggagaatggctcttccgcacagtgaggaaagggaggctggagagaccaggaaacatccggtgggcaagatgaagctgggagctgagtcggggtactaaccggagagcatgcaccggaatctgtgtttctgtgatcatctccttagcctgttttcctgtttctacgtgatggtggcagtaaatggatagagaccaaagttagagggaccttggtggagaggaagtgccagctatgcaaaaatatatacattttcctatgtaaaacgagcataaaattgctcgtggaatacattgctcttagtctgtaggtctgtatggagtgtcagttagtcaggatgtgagtgggatccaactggccagccctgttaatgtcgcctcttcaaggactcttcaccagccagcccgtgtgcacaaggctgtatgcaaggcgtgcatcctgtttgacttttgtgtgttaaaagatttgttttttattattattatttttgtttgtgtgtttttggttttgcttttgcttttttgagacagggtttctctgtgtagctgtggctgtcctgggactcactgtgaagaccaggccggaatcaaactcagagattcacttgcctctacctccggagttctgggattaaaggtgtgtaccaccaacaccctgcatttttttctttttaaaattatttgtacttaggtgcttctgtgaatagatatatgcacttgtgtgcaggtgcctgggaagccaggggtgtggattcctgctgggcccctcaattcctgtcctctgtgagagcagcacagactccccactgctgggccatctctcctgccctggtttttgtttgtttgtttgtttgtatattagaattcaagtgagggggctggagagatggctcggcgattaagagcactgactgctcttccaaaggtcctgagttcaaatcccagataccacatggtggcttacaaccatccgtaataaggtctgacgccctcttctgctgtgtctgaagacagctacagagtacttagaattaataataaataaatctaaagaaaaaaattcaagtgatatctatttatttacttatttatttattttcattcattcattcaatcattcattcattttcactagtgggtctctgagcacagccctgcctatcccggaagtcactcactgtggagatcagactgaccttgaattcactggacctgcctacctttgtgtacacctccggcccagctctttgtcccgttttgaataacagaagggagccggtttcctgtttaagctggtaggcttggcctctagactccaagtgtatttggaggcgctctgttgctcatcgacattccgggttttccatggtaagaccgaccctgccatcctaacaggtgccagcctggtaaagtacgtgcaggtgcgtgggaaggattgcagcaaaattaacttcctcttccgctttgatgtggtgctgtgatttgaacccagggccttgtgcattctagacaagccctccaccactgacctagattctcagtcaagaggtggcaatggaccaacccatctgtcacaaccaggcccctcctgcattcagacaacacggaggcttgcttgccaggtggcaggtggcattgtatgaatcctcttaactgcctcaggtgacggagccttttttggaatctttgtgacttaccaagaaaatacctcctatttagagatgaactctctgggttcagagacgggtgttccctcgttcacctctcagtacgcagttgagccacttacctatcttgtgctgtatcggcaatcgcaaaggattattttagttttaatctgggctgcttggatttagaatggctgctacctgtccgtaggagcgaggagctcgatggtgtcatatgccaaacccgagctaggagacacagagttctcccagacaattacgggaccacgctggaagactctcgtggaagactctttgtgagatatctaaccttcactgtcaacttgactggattttaagttaccaagatcggggagacccctctggttgtgtctctgggggcaggcattcccagacgtgtggttaccttccgtgtggtatcgctatccgtgggcttgggagaggtaacagagagagaaggaaaaccagtctagagctggcatcatggcaacccaacacctaccccattccgggctggccgtaaagtgagccggtctccaccatttgacttctgctggacagcttggacagcttcctgcttcctcaagctgagttgcacctggcacctggcaaccacgcctcccttttgtctgaatgcaggaatagctcgtagtcccagtagtcccatcgccacctcttgattgcagctgttccctgagtgatccatcttccccttcacacctcaggccttatctttactcagtcagccttgctgtttctgctgcccgccttgaggcttctgataccgtctccattgagatttgatgtgctcagtggcatgagccccaggtagcatgtcctgtctgatccctgtagctcctaggagtggctgtgaggtttcccagtcactcccaacctttgctgaccattccttcagtgcacaggctctgtgtccagggcatgcggctgaagatgcccacgccctgtcttactcagtcttgtggacccgctgagtcgggggctgcgtttggggaagctgctgtctgtttccttttccttgcgtagagctcgctattggtaggagctgtttaactaacccttttctttcagtcccttctccccctcctttagctatttatttgttgagtttctacttctattttttaaatcaacatagacaataagtgtcattagtcatattcacccatccatacctctctctgtgcctccttgtccccgccttgtctctgttccttgctgtcccatttcctcgttaccctccccagacctttccctccatctcatagtcctctttctgggtttgggcctctgctcacgctctatcctacacgtgcacatatagaaacatgtaaagctgggatctgcattcatgtgtgcgttacagttggcatcacatgtcaacctgactcacctggaaggagggactctcaagtgaggaattgctctcatctggttggccaggaggcatgcctgtgggacatttcctttacagtagttgagggcatgggggcccagcccactgtgggtggtacagtccctaggcagttgggcctgggttgtaataagaaagggaactgagcaaacctgtaagtagtgttcctccagtgttgccctaggacactcttgtcttgatgtccctccatgctggattctaacctgtacgccgaatcaaatcttttctcccctaagttgcttttggtcatagtatttagttaaagtaacagaagcaaactaaagcaatgtatttttctttctgggtctgggatacctaaataaaatatagtcagacccatccatcttcccgaaaagttcatgatttactttgtctttatagctggatgaaatcccactgtccaggggaacaacattttaggtaggggttatgtaagcgtcttctaaatattaacatagtaacctctaccaccagcctttggagtggtgaatactgctcttttccagggtgaagcagactgtgagcaacagagtccgctcagcccagcctcctctgctgaagtgcatcgtggtgtccaggtttacccttaccccagctcacgaacccaaagggaatactgagttgtagcagagcgagtgagccacctgtggcgccagcagggtctgagctggctcacctctttcataatagtgtccattaccccaaagccaagtcagaggttaatgtttacaacgctggagatgttaagacctttgtccggggtcacagccaaactgcagcagagcaagacccaactcccccagacctggagatcttgaagttaatctaatctactgcttgtctgcatgagatgtggatagacactggacacttgctggcctgatagaggaaaagtggacacaaacacctgaaagcttgctcttggtgaaagatgtccgagggagggtgaccaggagtagtgggtgggttctcttaagactcagcctggaaaaggactcagatcatggagagaatgtagccacttagcggggctgtgaagaagccgcttgtcctcaagatcagagcattttgaaattaagggaggggggatcggagcgtctctttcagagttgagcacaccaatgtcggtctgtgccgtggtcccatgtaactagggctattggacctggaggtataggctcctcagtgatggttctcagagaacttctgacacaggaaaagtgggcagatgctgaggctgtaaggctggtgggggagctgggctctggatgtggggccccagactgtggtcagtctcccaggagattgctgcacacccgaaagttgaggagccgcagaaggcagggccttgagagctttgatcccgttctgaaggtttcacagaagcaaagcaggtgtggggcatgcttacaattccagcatctggaggcagaagatttttgtctcaaaacaaaacaatacccaaacaaaaacaatcactaaaacaaaacaaacaacaacaacaacaacagatccccacatggtgtctatgacccaccatggagagagagaactgactccctgaggttgctactttgacctccactcccaccacataagatttattttaaatgaatacatgttttttaaaaaagagagaannnnnnnnnnnnnnnnnnnncccccccccccccgcttctcctcttaactaaaaatggctgcccttgtggctgtaatgagggcctccaactgagtcacggcctgcttcaatgacctcacagctgggcattaaataagcacttggtagaatcatgggcgagcgcgcgcgcgcgcgcacacacacacacacacacacacacacacactttgcaaaatgccacataattaattattttccttattttcctctctgctgcacagcacttcctttatgcacatgctaacaggtgaaacttccaaaggcttagactctcacacctgtggcacactgataatctctcctctagccactataaagcaacaaaaccgccagtcacagtcgagacctatttaactgatttagggaccatgatggaccatagccacaccaagcagacccctctgctgtgagaaggtaccactgaggacccctggtcacctgtcttcccgtcttagatccttcctcctccatagacctggctccgtctcccttgctgcttgttattctgtaggacaggggactcccagaacccattaagttgaatgcctagccccctagtattgtagactgtgattgtactttgagataagatctctaaaataggtaattaagagtgaattgtctgattgtgataaactttttaattcaaggttagtgtccagatttcctctttgtatttgtggacactccataccgtggacatttatttggatgccgggaatcagagaggatcacgtcaagacgctgggttggggtgggagtgcgggggtggtggcggtggtgggggccacacctaacaggaagtagaggcctcagaagaaaccagctcagatgccaccttcatcttgcttttccagcttctgcaactgggagggagtaattctctcttcgtttgcagccacttggactgtagttcacagtagccagggcagatgaatggaatccacatgcctcccagaagccacggatacatgaagtgtcccgttgtccttagctggggccgttgttctgacctgtcccctgtctgctgagcttgcctgagattctccctctgtctcggcagctctcaccacacagcttctccctttcccttcagagttcacgagtcaggttctgctgtaattccagaacgtcttccgacgtggaaccgactcccagccacccttcagaacgctgttgttgattaaactgaagaaggaaagctctgtctctggacaagcagtctcagtgttctaagcaaattatagcttttgaacctgggtcactgttattgttggtcctggtcccccggcgcctgtggggtgtgtcgtgtgtctttgcaggaggctgtccggtgtgtatgcttttttgtgttcttccaggctatgaaccaacatgggctcatactctgcagtttctcttcaacatgcaaatgctccagactggtttgctttggggaaaaccccagtcaagtccttgggggatccgatattagcagtgacgaaagaaagagagagagagagagagagagagatggctccattgtgctctttggctgcccccaaatcctctgtcctgtgctcctttaagtatatagcacagcactgtttttccggaaagtgtttgtaaagggaagattagtcccttgggttaaggcagaacagggtctctcgtcttccctctctcgggtggatggctggccacttctgctgccaactgtcccctagtaagatgaaggcttttgaagggaaattccaccaagcagccccatcatctctgctccttgggagggattcctcacttgggaggaggagtttcattttctaagagtcccttccaggaaggataaggtgcagccggacaggatttcccacagagctggtagcttaggggcatgggagagggagttagtggcctttgatttctgggaattgacttcttttaagggcaaacctcggtgcttaagtgtcagctagcaccgaacattgtcaggatgcgggaaaggccggcagccatgatggttttttgatggtcccttcaaaccttgactggccaactttagatgaccctgaagccattgtgagtccctgtggaaggctgccagatgcaactcttttagggtctccagcaaagcacgcagtgtgcatttcatttcctctctctcgggtccggagatccatttcctggtaagcatttcaagggaagagaaagctgaacttgaatgaaaattttaaggattccagtagcaagtgtcgtgcctgcagtgtccttcctgaggagtaatttggagtcttaggcaagaagcagcctggccctgtgtgtcccgtagctccccaggaactggcattggcagtgggcaagtgttagttagcccagacttcctccctgggccttacttccgtaggccttctctgacacaggcgtctcccgtctctgtactcgaggcttttttttttttttctttcttccttcctcccttcaggctgtcgagatggctcagaggttaagagcactgaccgcttctgctgaaggtcctgagttcaattcccagcgaccacatggtgactcacaacaaccagtaatgagatctgacgcccacttctggtgtgtcagaagacagctacaatgtacttaagtatagtaataaataaatctctgggccagagcgagcggggactgagcaagcagagttgaccagagagagcagaggtcctaaattcaatccccaacaaccaaatgaaggctcacaaccatctatacagctacagtgtactcatatacctaaaacaaagaaacaaagaaacaaatcttttttccttccttcacacccagcaaattgacccgtgttccaacatccacaaaaacccgtgcccagtgaggctgtctgggctgtaggttgtgggtcaccttttctccaaaggcagaggtgtcttaccccgcaagagtggcttctgagatctgtaagggatgcagaccttgcaggcagctttcctaagggaagggagagtgccatccgtaacctggttagtggcttgccaccggcagcagtcttctgtctccagctgaggacactgtgcactgtggcacggagggtgaggtgctaccagccgcaacctgaacaaaagggacgggcggggtgcccagttcccggctgcagcagctccaagtccaaggctgggagagagatgtgcttatgatgggcttcatgcacagtcggtacggtcagagaacagcttcctgtgggatgtggtggtttactgtgcacaagttgtgcttgcctgccccaggtccccccaaagtgcagtttctgaagcatgcataccacactgcacaaacagccaaactcagtttctcacccgctgccagattccttagagatctggcgtctgttttgatggtagggggaagggtcagtgctttctgtaccagagtctcctgtgggtttgtgttcttatgtgatgcttatgctgtgtgtgtgtgtgtgtgtgtgtgtgtgttaggaattatacctacagactcccgaatgctggcagacaccctaccatggagccacaccccaaccattactcctctttttaaaaggaagtggtcacttcgacaggctctctctccttgctccttccccacaaaggaggaagacaaccctgccctgatttaccatgaaatccaaggatcatgggaatggatggttatctgagatgagagctaacctccctccctcnnnnnnnnnnnnnnnnnnnnnnnnnnnnnnnnnnnnnnnnnnnnnnnnnnnnnnnnnnnnnnnnnnnnnnnnnnnnnnnnnnnnnnnnnnnnnnnnnnnnnnnnnnnnnnnnnnnnnnnnnnnnnnnnnnnnnnnnnnnnnnnnnnnnnnnnnnnnnnnnnnnnnnnnnnnnnnnnnnnnnnnnnnnnnnnnnnnnnnnnnnnnnnnnnnnnnnnnnnnnnnnnnnnnnnnnnnnnnnnnnnnnnnnnnnnnnnnnnnnnnnnnnnnnnnnnnnnnnnnnnnnnnnnnnnnnnnnnnnnnnnnnnnnnnnnnnnnnnnnnnnnnnnnnnnnnnnnnnnnnnnnnnnnnnnnnnnnnnnnnnnnnnnnnnnnnnnnnnnnnnnnnnnnnnnnnnnnnnnnnnnnnnnnnnnnnnnnnnnnnnnnnnnnnnnnnnnnnnnnnnnnnnnnnnnnnnnnnnnnnnnnnnnnnnnnnnnnnnnnnnnnnnnnnnnnnnnnnnnnnnnnnnnnnnnnnnnnnnnnnnnnnnnnnnnnnnnnnnnnnnnnnnnnnnnnnnnnnnnnnnnnnnnnnnnnnnnnnnnnnnnnnnnnnnnnnnnnnnnnnnnnnnnnnnnnnnnnnnnnnnnnnnnnnnnnnnnnnnnnnnnnnnnnnnnnnnnnnnnnnnnnnnnnnnnnnnnnnnnnnnnnnnnnnnnnnnnnnnnnnnnnnnnnnnnnnnnnnnnnnnnnnnnnnnnnnnnnnnnnnnntgggggtggtggtggggtgacaggtacctaagacatccatgtgtagtcctgtctcctggagccagggggtgggggtggggtggggcctgggggtgaaagggggtgagtttagccagtgattagaagtgagcagctggctttagaggctagaggccgggcaagcatagtgctcagacaaactcaggggaactgccaagtatccaggtttcaaagacaccctgagaggccgggaggcctctgggacctcaggtctctgtgttcttagttagctgaaccacctggctgttctgttggggtgacatgtttggtgccaacacttgcctatgtcctgcggtgggcagtgtgagacactggacctgggagactcctgaagccttggggtctgctcagggggcagagtcgggcagtgaattccgatgttaggagtaagtttgtgttcaaaaaagaaggagaccacactccagtgcaagtgtccagacaaggccagctgtccttttgatcaagagagtgttccctggagggcaaacaaagacagacaataagtgtatttagatttattgtaaggcaggttgtgactgccatttccccttggctggggtccaacctcacagctgggtagtctgaaaaacctgcacacaggtaatgaacgaaggggagggaggcacactgctccaaagagagcctttgtgcaaataagggctttagtgtgtatgtgtgcgcgcgcgtgtgtgtgtgtgtgtgtgtgtgtgtgtgtgtgtgtgtgtaaaacatttgcataaaagtcttaaccaggcaggagagataaaatgacttgaatctcgtgtcctaaacacagttctatagcatttgacagaagagactcttacttggtattttcttccctttggtgtgtgggaactccgtgtctgagggcctggggttcggggtgagtttgctctagttgagcagtccttccttcttggtcatgttctctttgagttaggatcttgttttgttgttgttgcctttaaatgtgtatgggtattttgtctacatgtatgtctgtgcaccacgtgtggtatgtatgtgcattgcctgtagaagccagaaggggacattagatcccctggaactggaggtgtagccctgtgtgaattgccatgtgtgtgctgggaatcacagcctagtcacctctctacccaccatcaagtagtatttttttaattaataattttatttatttacattctaggtgttgctccccttcccggtactctgtcccatagtgcttcatccctcccccgcctccgcctcctttgtctctgagaggtgcatcccccttcctggggcctcaagtctctataggattaggcacatcctctcccactgaggtcagaaaatgtctgcatccctctcagtcagctgctggttagggccctggaatcttctctcagcatcctgttcatcctgtagcctggatgaaggacgagggaagtcatggttgatgtttcccgattccccttgcttctcccagctctgctctctcccatccttgggacaacttaatgctctctacccaacacactcagcacacgtgggttggtaaggacgtcccgggaatgcagtggactgcagggcttctgctctccgtgctgcctttgattgggacacgctggcccccaacttctcatttaaggagccctgcctcttgctgtctaagctatctccccaccccaccaccttgtggctccctgttggttcactgtgtagaacctgtccttctgagcctggctctcttcagtatcctggaatgtgagttgcatagagaccataatctgtggtctagaactcttggaaagagccttttgcatagtacatgcttaaggcgtcaattccaatgaattgttatgatttcagcttcctggagccttgccttcagattcctggagaaggactgagatgcaggactacttgctatcatgtgctgtggctgtggggtggctgagggccctaaccctaggggtcaggagtaagtgcccctctgactttggccaacttgaagggacacagcggaggtgatactgtactgtctcttgtgggttaggaatgtcttccacagttcttgtcccaggctggtggggggctgcgtctgtggtgtcctcctcctctttccagtaaggcacaggcacgctggaccagaagcctggctagagttccctctgggttagcttggagatggtattcagaaagctgggtttggtggtgggatggtggggactaggcaatcaatccagcctgcggatgacagcccaagcatgaatcaaggtctccttcactccattgcttctgtctgacataccctgtttgcaagggtctcctttactccattgcttctgcctggcataccctgtttgcaaggtcgccttcactccattgcttctgtctggcaggccatgtgtgagtcaaagtctccttcactccattgcttctgtctggcagaccctgtttgtgtcctccttagttgctttagtttttccaactctgtgcacagttgtggctccgtggaatattttacagtgaaattggagaagggcatcgtcaccgttgttgttgttgttaatttaaggaaagccatttcagaaaatgccccgaagttcattgtagagtttttcctcttctctttattttttaccacataaaccctttagtagatggccgagggagactggtcaaagggtttttttgttctccgaatctgtggctattctggatgagggttgtatgtttgtaactgccctgatgcttcaaagcgtgaactggctcgcctggaattttcctcagttctgcctcactgacacagggctgcccaccagaaaagcctgtggtttgtaattctcccctttagaaatgcgaggctgtaagtgggttctcagggttatcatagagtaacctgtccagagcctgtattttgaagtacagttatttcaggttgtcagagcattggtaacaaagctcattccaggtctggagtcctggccacaaattttccacagtgcctaggccagagaggtagtgtacttggctataggaaagtgcaggtaatctgcatggagaatgggtgtcatgttctaagctagcataaggacggttggaggttggagtttgggtcggcgcctttagtttgttgtagagcaggtgtgggcctggcagactctgcctcctgcttccagagcttaagcaagctcatttgtgccacatagaaaatgaccagaatcaaaactcagatcggcgcttatctatttagccatctgtctcttcaaatgcagggtggtattgtaaacgttaaatgaaaacttaggcgcaactacattaacagcaatttttcatacttacagttaatccatagcacacagaactaagtactcttcttccctaggctttattccactttccaaaaaaataattctgaattatagggtggcctaggctgggggccaaagtctctgagtcaaaaatgctctcgtggggccggagacattaaaaatctaaaaggggagtctggaggaatgcagagggtctgcatgtcatgcacaaacaagactctgagcttgagtccccaacactgcatggagaaccagttgtgctcctttatgtgacagacactctcacttcccagttgctgtgacatgacacaacgtgcaaagccaatgaccgaagcaacttgcagaggaggagagaatttgtttgtggttcctgcttgtggttccatggtggggaacatggcggcaggcagaccatccctgtggctgtagctgagagcttgcatcttgatccacagctgtcttagtcaggctttctattctggcacaaaaatcatgaccaagaagcaagtttgggaggaaagggtttatttcgcttacacttctatactgctgttcatcaccgaagaagtcaggactggaactcaagcaggtcaggaagcaggagctgatgcagaggccatagagagatgttctttactggctttcttctcctggcttgctcagcctgctctcttatagaaccaagaccaccagcccagagatggtcccaccagcccagagatggtcccaccctttcccccttgatcactaattgagaaaatgtcttacagttgaacctcatggaggcatttcctcaactgaagctcctttctctgtgataactccagctgtgtcaagttgacacaaaaaaatgaccccttgtcaacttgacaaacaaacacatcactggtaagcctcaacccttagtttcttattcattcccaagatctaaataacttaaaaagtcccacagtctttacaaattcttctcttaactgtgggcttcactaaaaaaacttccttcaagagggaaaaatattagggcacagtcacaatcaaaagctaaaatcagtctccaaccatccaatgtctgggatccaactcaaccatcttctgggctcctccaagggcttgggtcacttctccagccatgccctttgtagcacacacatcgtcctctaggctgcagatgcctgtaatccactgctgctgctcttggtggtcatctcatggttctggcatctccaaaacactgaatgacctcttcagtcctgggccatcaattgcaactgaggctgcaccttcaccaatggccttccatggcctctcacagtgccgagcctcagctgctctgcgtgacccctttgtgccttcaaaaccagtaccacctgggtaactcttacacattattaagtccatccacagcacaaggtacaaccttggctatctctggaacacagcctctgtgctctcagaaaacacttctcagaagatgtcacctcaatgatgctggtctcttcttaatcaccgctaatttcttagctccagctaaccagcatcaatagtcccagtaatgcaaaggttttactttagtagttctggtactacttgttaatcatagctgattcttcagcaccagataaccagaaccacagaatcttcacaatccaaaatagcaatggccctgaaaatagtctttaattttccctctgaaatttcacaagccaggcctccatttttctgcactgttctcaacattatcttccaagctcctacacaacatctcacagagttcttaacagcgaatggatcttctggcccaaagttccaaagtccttccacagtcctccccaaaacatggtcaggtttcacaggaataccccacttctggtaccaatttgtcttagtcagggtttctattcctgcacaaatatcatgaccaagaagcaaattgaggaggaaagggtttattctgcttacacttccatactgctgttcatcaccaaggaagtcaggactggaactcaagcaggtcaggaagcaggagctgatgcagaagccatggagggatgtcctttactggcttgcctcccctggcttgctcagcctgctcttttatagaaccaagactaccagcccagagatagtcccacccacaaggggcctttcccccttgatcactaattgagaaaatgccttacagttggatctcatggaggcatttcctcaactgaagctcctttctctgtgataactccagctgtgtcgacttgacacaaaactagccagtacaacagctctgaggcagagagactaaatgggactggcatgggctttagaaacctcaaaatccattcctagcggcacacatcctcacccttctttaatagatccattaaccggagaccagttattcaaaagtatgagctgataggggcatcctcacacatagcatcacgtacatgagcctctcctgacctggagatacgagaaggtaaagtcaactctctcacgggcttagaggcacagtgcagagccacctgagtgacaccagtgtgatcaggagacggaaagggagggatgtagattatgcctgtggcagaatttctgggtcaggacagaaagggaggtggagcaggttaggattggtgagctgtattcttgtaagctatggggagagccccgtttgcctagcatctggctctgggacgattcacagagggatgctgctttggggtgggcaggccgtgttgaatcagggcagtagtctggttctgcgccttgtgggtttgtagctatccaaggcacgttcctgttggatattcaccgtctccaagagctggctagctccactgtggtcggcctctccccagctggagaaggatttaagatactagaacatcagcatgtgtagaagacagaaataatgagtggaataatgttcttgctgcataaggattggcagggcagcctgatggcctgggcagaggagaaagttgcttgggcagaaatgtggagcaggcatctctgggttcagctggaactaggaggaaggtgaggggagcccatgatgcctagtcagggctcacctctaactctcccatgcacttgaagaaagttcaccaaaaggctcacggccttcctttgtgtagggctttgatggcacagccgtgaggctgcccaagggcctaaactcataactggatggaagcaggggccagggacattatctggagccccgccctcccccaagctaagttcactgtgctgccattgcaggaagcctgtgacgtcaccccagacagagctgtcacaaaagggaaaggcccagacttactgtatggactgccggtttagagactttgctaaagatttggcttccttttgtggagatgccaagtaactctggacctggctttgcatacggtgctttttggattcggagaaaaatcagttgccatagatacatacttttgtatgcttttataacgaaatgtctttttcactcctgtgttacttgaagacattaacttagtagggtttcaaggtatgtgtgtgtgtgtgtgtgtgtgtgtgtgtgtgtgtgagagagagagagagagagagattaagagggagtttgtggttttaagtagcaagaatttaggttgcctaggcacatggtttcttttatgctagaagctttggaaaacaaaactgtcagaaatgattagtcccctcatggagtttgtagctcatgaaaagcggggaggactgggttagatttcgtgctggttctggaacttgtggtcacttaaacacagaatatgcaggaaagtacctccgcatctcaggcctgtggaagttttttttggggggggggcacgatagaggtgggggggtgagacaggatttctttttgtagctctggttgcctagaacttacagagatcctgttgagtggtgggattaaaagtgtgtgccaaggggcctggccagtgagagttgtccataagacaccacagcagaatagattacattgcttgggaaagttgtagatagatttttatctttgaataatagactattgcaaatgcgtcatacccaaagtggtggctgttcagcaaatggcctgagacctttcctgcaaggagttacttcatatacttgagacatgcttgcatgcatttgctaatttagatgtttcatggatgcagttgatggatgcagttggtaggtagaggcatacaagcagtgttctcgggtgagaggaaaaacctcgatagaggtcggcctcgtttttcaagctatcatggaaggccttgaaaacttcggctcccttcttccagttgcgtgtgctgtcttgttccgtgatgtccctctgcttctgttagaaccaatgcctgctgtatacataggaacataaacttgagtaaaccagatggttccagttcaaagcagagcttctcaaggtatttatgagagccattacaagtcattgtctccttactgataaatttgggtaatcagggtaatattaataaacacagactgctcatctgctgagggctaaaggaatgcaaatagttttgaggatttgtaggctaaaaatctcttacaatgagctgtggtctggaagaataagcaacctttatatagtgggagtgggtgggtggtatgcagggatgggtgggggggctataagagccaacagccaatactgcatctgctttcttgtgccccccacctttcaggccagtatctcagtgctgtggccttggtggcctttggtgatttgtttacagccgggtgtgtgactcagggtggtagacgctgttttagagagagctcagccaatccctatcagattgcacatgagatctgcccgcagctgtctccagatttatttgcttgcttctcttcaaccacagacacacgctaacctcagcctaggtctcgagaagcggaggtgactggtcctttctggtcgggtccttcctccccctgtattttttgtttattctctggtgaaacagacccagaggaactttggtggtgcctctgcctcgagactccctgcttcggatgtggctcatagacccagagaatggctgctccctgcgtcctgggagaagtgtggactctccagctccttcaatagtgcgccgacccagagccatccatgaggtctctggggaacggaagtgccggggactggggggagaaagaacccagacccactaccattgttgtctgtctagataaagctggtcggtgccttattctgaggacaggaagaggaagggtagaggtgtgctcatgagatggatttctaagtcttctttgcctggagatctcacctagcagcaagtgtgctcagaagacgttgggtggttagtccagaaatcaggagatagaaaaggcggcttcaggtgcttagctgagctcagtggaggctgtggcttgcctatacgtctatcttagatcacaatgctaactgaaagatggaaggcatatagccatctcttgatgagtgacatacagtaatagatgtgttaccacaaatgacaccaggattagcacttgggttactggcctcatagaaagcccaaggcttattgcatgcctaatgtgaagaccatacaaatgtggattttctcccaatcttcccttctccttcatgtcttcttttttggccgtggaaatgacaagtatgtatgcagtagagtgaacagaacagtctaaccaagtcccaagcagcctcctctgagcttcagccatgatcagctcccagccaatctcatctgctctctaccccactctcttccccactcggagactcgtacacttgtgtgttcttggttgcaagcacgtttccttgcttttgatttgtaaagggacgctagaaccttgatttgttaaagttgttatgcgcttgccgtaatctcacgagtattctaggggatgcttaattatgaccgtataggcactgttaaatcaaccgtgaacaccacgccgtctgtcttgtcactttctgtgtgtctgtatgagtttgtgggtgcacatctgtgcatgtgagtgtatgagcaggccagatgttgacgttaggtgtcttcctcaatccctatccaccttagtttttgagatagtgtctctcactgaacctggaacaaacaacaaattcagctggagagcagtccagccatcctcagggtttctttcgcctctgtctcctcagcaatgggattattggtacgtgatgctgtgtatgatgtgtgtgtgtgtgtgtgtgtgtgtgtgtgtgtgtggtcagaggacaactgggaggagttgtgcgtccctccaccacgtgagtccaagggattaaatccggttgtcaggcttgctggcaggtgtctttgcttgccgagccatcttgctggcacaggttggaccatctatgactaaccacacacctccgtgcggctttctcacctgtacaacctgccgttctctgagtcttgatctcagacccacagactggaagcccagcaacagggatctggctttacagctcgtgggctgcacagatgttttcttgtagcttaaaattcaaggtctgaatgttagagagtgtagcagcaaaggaggagggagatttcaaaccatgccttttctttctggtgctggcagcagaagtgctgagggggcagtgatggctggtgggcactgtgctgagccctgcagtctcatattggactgaggtgcatatggtgaagccctgatggaagaagccatccgagtggagatgctgacatcttcactgtcagaaggccatcagtgtcttgagaagttagtgggaagtcaagagttcccagagttgatcagaacttcacagggtcccgactcagactgcttcaagcctgtaagattggggttcctaggacactcacttctgacacagtgaatataaattcaggacctcctatgacccgcttgggcttaatagcaatgtctcacaggactcaggaaagtgctatacacagaactatgatttttctacagcatgtacatactggttgaaatcagtcaggatcccaaaagcacagctttctggtcctatcccatgagctgggatttgccactttctggacatgctaatggctggcacattgtcttataatgatacccagagtgttggcaaccgagaaagctcataaaagcctcacctgttgggcttgctttctgcaggtggcattgatgtgcgtgggtcatgagatccatctcagactttctgccctctaagccccagagtctaggcaaagtccatgcctgtcaatacatgattcgtccatccggggcagtttccatcgttggttttatgtagtataaactttccaggggacctaatgtgagtcaccttgttagcataaaccatcagaccctgtgacctgggaaattcccaagacttagaaaagctagggtcaaagtccagccaaagtcaccattgcatgagtcccctccctcccaccactgctatctagatccttctacacagcaccccccccccaccagtcctctccactgacttggagagcattctagagtcaggttgggaaagctagggacacaatcctgaacagccacagagttcaggaggcaaatgctggttcagagcccctggccaaagggttgatgctccatctcctggtggaagaaggcactctggctatacaagcacgacttgtagctcaatctcccactgtctggatgagcacctgcagcgtatcacacatgagctgcatggccctgggcaaaccaccttccgtgtgccactttccctctttatggatatatgaacaatagcgttcaatcaagtttcctgtagctgtcctatgaagtgacaacacagttgatggtttaagaccatagagattctacacagttctgaagaccaggggtctacagtcggggcataggcaggcctagctccctctggagacaccacaggagaattttcctgactgagtacctacagcttctggcactggtgattgttggcttgtgactgcagccttcagcctcttcagacagccatattgtagtagtgagttgggctacacctctttggctcccggcagatcgtatgcatgcacgcatgcatgcatgcacccgcccaggacctatccaggtttttcaagtggaagacacacatatatgccagttaattttaaaatgccttggctacctcaaaggctgggcactccttctcctgctaccccatgcccaattggggaagtagccagcggcactttattcttatatggctcattggttttatctcttgtggctcttacctccatccatatcccacaacttcatggtgatctctcctcccctccccctccttccccccatggcatcttagccctcacaactctaagggtctcgccctgtttccctcttcccagccactggctgttgacatctttattgtttgatcaaaaacatatcagagacaaggacctttagtgtttggacgcacagatcccctattaaatcaaaacaccagaaacaatctccaacagccagctgagcccctccccccaccatcgatagcatttacaccgtgcctggtatttttgtgaacaacacctacattccccatgaatccagtaatggaggggcttgctggagagccaagtcagaggtcagggggtcctgaaggagctggaactgaatcagccattcaaggaaaaagagctacctacactcagcgtgcatggctggtgggtgtgcaaaaccattgcttggaggataggtctagcgttttcttgaaaaggggaacatactcttacatgacatagcaggcactggtattttaaccaaatgagcttaaaaccctgcacataggcaattatagcagctttattcatgatggccaaatgtgggaacaaccaggatgcttagctggtgaatggatacacaactgctagattcagagtaggatccagtgataaagaaacactccacaaaaggcccggggctacgcattttgaatacatgctgctaagagagcaagtcagttggaaaaggggagatcctacaggagctgactctgatgttctgggtacagtcaaacaaagatgagtggttgctcagggtagggagtaaaggggtgaaaagtccaaacacagacttggggctgtgaaaataatctcgtgactctgccgtggtggatacacatcattaggcggttgtccgagcttaagagtctacagcattctgaagtcagctgtggaggcttcgagacacacacacacacacacacacacacacacacacacacacacacactcacacgtcaacactggccacctgtggtaggagacagactgctctggaggtggtgagttttaagagtgggcaagtctgtgtctgtacggggtggggggagggttagggacatacggacatgttctagttttgctcgggtctgctgtgaacccccaaagcactctaaacccaaaactgtcacgaaaattttaacaaaagaaaaaaagggcagaagcctactgggtggggatgaagccaggcatatcaaggcatgttattggcacaagttggccaccagattggctgtgaggtggggatgttgctgtgactagaaaagccggtttgggccactgcaaatatacatcacttcagttaacctgaacacatgcatgtttgtttatttcccatgaagtgatacacgggaggcgatactgagcctgcagtagggatcagatgtgaactccatgtttgcatacttgtgacccactcttccagcccacataaagctcttctctggtacttcttggtgcccaaaccccagtgaagggcattagatgctcacatccctcatttcctccctccctccnnnnnnnnnnnnnnnnnnnnnnnnnnnnnnnnnnnnnnnnnnnnnnnnnnnnnnnnnnnnnnnnnnnnnnnnnnnnccctccctccctccctccctctccacgtccctctttgagcttgggagcaagagccaagtcacaccttatgcaggatcaggtttgatcatttgggagaaagtgattcaaacaggcagtgctagccagcttctcagggttggtatagcatgcttggcaggtcacaaaagttctaggtgacaatctagtctcacacttcctcgcagggggcctcagaggagctaataagagtagggtaccgcctgcttctcggaagatcctctgtttggtagtttgaagggacctggctctcttgtcccatcccaactatgtgactcctgctgtcagaatgggattataagtgtgattctttttttcacttggtgaagtgcttttttgaaggagagggggacatgtgtttgtctgtccctttacagtgctgttcttggagctggttatttgggaagaggtgatggtgaggtaggggaggcagagaagctgtgaacagcgtggattctctcttgggaggaaagggaagctagctaggagcgcctgctggcctgaggccctggtgaggacatgtctttaccctgttctttctgtctctcttggctcctgtgaagtgagcgtctttgggtaccacacactcctaccacgacatcctgtctcacaacaggccaaaatcaatggagccaacaaccatgtacaatagcatctgagtagcatgtagcatgtagcatgtagcatgtgagaacccataggaagcaggatgtggaggatgcagggactgggacgtcaggtaggagggaaacggagcctgcttattttaatacacaccaggcaggaggccttttgggaatgtgatacctttgagctttgcttcgtttgcttgagacgggctagtcctaggctgaacttgaactagctatgtctaagatgaccttgaattcctgctaccttccatgtgctgggatcacgggcatggcccaccttagcagtttttgttttgagaatgttttgggaaagatggcagcttggtagatgtctcatgtatgtgtttaatgtggtttgggcatggacccagagtccaggaaggccaagtgctgacccaccctgagatcgcccagtcacacttgtgcccacactggtgatcatactgacacctgtgctgagggagcgctgaacgacagcagggcagggagagccaggcaagctggcggcagttgggtgtgctaggctctccgagccaggccactgggaactttgtggtgagggaggccctggggaagttgggagattttgtttgatttttctgttgcttactggatgggcatgaggtcagagccaaccgactggcatgccagaggagaagccgatgttggcggtttgccccacctcttccctggcaacatttaatcaccgaccaactaggaaacaaacttctgcctgtcagttcctcatttcaccttagtgctgtttccaggctgggaagcgcttttggccctacgaaacctccaccatttagactcatttattatgcatgtctgtcacccacaactgttctatcctgtactgctgactgataatgggttttgagtggaaataaatcaaaaccaaggacttgcagagagcatgttcattcacgtattgggcaaatctgtgtgtgtgcccaccatgttctaggcttgggacttgcttacacgctgtggagaaaacactgtcttaaaatggtgatgtacaatagcctaggagaggctgactcggaggtgagtcggagtggctgctttgcaggtccaagtgacaggtgtctgcagatagacagtcttgaggagataattgggatggctctcaggggtttctaacccgggcagctggaaacatgtgacctcagtttaccaagagataagaagggaggtgaggccatgtgaagggcagggtttcaagggacagaaagcaatcgattggggcattttaaaattcaaggttcttgtccagtgcactggaggaacaacgtgtgggacaagcaactgcttgtatgagtcaggtgtcttacttacttctatataaagttaggtctattgcgagatattatacatcagtattctgagaacttctgttagcggtgctttgagaggtaaagtttgattcgcttctgttaataaaaccttgtttggacccaaatgacactagtgtttcgctcactaaggggacatagttctctttctgtgcacctgaaacttcccacggtgccacttcagaggaacgctgaaagggaaaggcaggctgcatgctaagcccttccacttggggggacatagagaacacaggaagcttcctcagacatcgcccccctggaaacacaggaactggggatccagtgaggaacaaccagccactgggttccattaggaactgaggtcagggctcagggtttagagctgcgcacattcctgttactgtaacaaatgcctgcagacagccacctactgagagaaaggggccacatcagaccacaggtgtggaggtttcatttcctgactgcggttctggctctgggactgcagctctggtgcagctcctctctgcagaggagagagagggtgctggagaacagggctcaggtttctgacaattcctgtgtgctcccagtaacccggctgcccctgcccccttacagcctaggccctgactggggattaggtcattacggggtagttacgatccaaaggacagttgtagatcatttttagagacgagatcaatgatcgttctgagcttttttttcctttctgctttgttgtttccagatgggtaagattctggctggggtgtgaagtctccattgttcgatgtatctgcaatcccttaggtcattatagtgtgtgtttgtgtgtgtgcactcgatgtgtgtgtgtgtgcgcgtgtgcatgcgaatgtgtgtgtagctgcagtgaaagtataacgtaaaaacaaaattctaggcctttaggcccaggcttgagaatgtgacctctgtgactcaatgctccaaggtatgctaatcataaaacagatagtgccattccttcacccacctgcttcctgggttcaaagagtgttcattcaaagaaagtcaccctggccattgccagaacccgctatgcaaatgtgctattgttaggggctcttagaaactgtcttgagagataacctgcacaattaccaggtattccttgagactcttgtgactttgcacttccttgggactcttaactggtatctttggtattttccaatgacgccctccctacttccttgagttgtggtttctttctttaaataccaccttacccagctacttggggcgccacggtcctctacccctgcatggtgtatgactgtgggcccgagagtgctcttgaataaaaaaaaatcctcttgcagtttgcagcaagaccgtttcttgtgtgtgatttggggtgtcacctctcctgagtcagaacgtgggggagtcctcacgttgtgggtctttcagcagcatgtgtgtagagggcactttgtgtctatgtgggttctggggctcaaattaaattgttagggttccagtgcttttattgttgaagctgtgtccttggtctagaaatcaatcaatcaatcaatcaaccaaccaaccaatttctctctctttctgtctgtctgtctgtctgtctgtctgtctgtctcagatatgaaactagccttcagagacttgggcattctcctttacgtgggctgcagtgggagtttaacatcttaggtgtcgtcacccctcttccccatgtccattcttgtttaacttgtggctctgagcattctgtcattagcggtgtgaacacagacacacttcccacttatgcagtggctaggacatcaccgggactcagggtcagggacacagacaatcttccctcccagagctgctctttttttaatgtttatttccagggtgtggggccttttctttataatagattgtaattgttaggtttggcttctgaaagaagtatgaaatatcagactggttcaccagagaaagcgaaagagcagtgctgactgaacaactatcaggtgtgcacagccattccaaccctaacgcactgagccacacatcaatagctatcaagtaatgaaataatattttagtttcatcatacttagatgcaaaacaggaaggtgagggaaagaaaggtggagatggcttccaggatacgaaggagggagaacggaggggatttactatctcgtcggggaggttagtgtttgtctcttctacctgcatgcatggtaaatgtgaagttcatggacactgagtgtttgcatctgggtgatggagacaggatcacgaactgttccctaggacaccgaacttctgagttggcaatccttccctctctagcacactgagaaagcaggtttcagaatctctcaaatttttaggaaaagcaacagcagcagcagcaacaacaacgctagattaaagatccatccccttcagtgaacccttcatgggagagacaaccacccaccccccagcccccagacggctcctgtccctctgagctgatggatggctgcctgtgtttggcctgcagcaaggtgaagcacacttcaggctgcgtctcagaaagatgtggccatctcccttatacaagatctcgtccgttcagcagctgtggattgcacgcctgtcccaccaagcactgtgcttggtagcagaggttgtgcgttgcgtgggggtagtcactgctctgaaggagttacaggcaaggacaaagtgaaagctatagcaagagagaagggaatgctgagagctctggaatcaagagttggctcaatctgacagtgacctggggatgttgactaaaccctctcagagataaatcctctcagaatgaacgcacagtttgaccatgtataatcacctactgcttaactacagagtattctgagagattgtcaccaggaagttttgtcactcagaatcttgtgcacacaaatcaagatggccagtggtaccacttggcgttttatatcttagggattaccatattaccagttattgtccaccagaatgtccttatgttgcacatgaccacatatgacttaatgcatagatgatcaaagatagcttcttatcctagtgtgctttgcttgacagcaaattaaaccatgtgtctcagcctggggctttttgagatttgggtagtgagagagcctgggagaagcaatctgtggtatcttatgaaaaaaagtttgagttgagcgtgtgttgagttcatatattgaatttaacactactccctctttataatgttgctacatacgatgcaaatgcagttaactgtgcggtctcattggacagggttaccagtgctttcctacgtcatggggcttgggtcttgagtttgaactcaggacctgtatatgctaagcacttgtttggctacttttctatatacacccaaggccctttcttaactattatatttcttccccaagctgattttacctgctgattgaaaacaaagctcaccacaaaccatattaagcctttgtaagcctaaaaaatgctaataaattccacttagaagtaccggatggaaaatacccgatgttctactggaagagagggctcaggcgtgtaggtagtgtctcagacatgtctgggagcccacctacattgatccaaggcttgcaaggtgacaaatgtcctgaaaactcttggggagggtgctaagagagaggtgagctggttggttcctcagtgatcaactcactgatccctcagaatctactgggtggacgaggcaggggcattggcacctcttgggacccccaaatttactttggaagtccttgtaatgtctgctatggtcttggggagctgtcatagctctgagccaaaaagtctgtgcctttggagtgtcctgagcaagttgcgtggaggttgactgaacaccttgctccctggagctgctgggtgctctcctctacagaaacccctgagcagcagcttctccaaggggagagcttcccagagtatgcagtcccctgtaaagtgtgcactctcaagagagacaagaggaaagacatctgcttaattcagtaatctcatctatcaaggctttctagaaggacccacatttaattgcccaagagagacacatgtatattccctggccttctgaagctttcgcacaaaagatgatagattgttcctgtgagtgggggtgggggtgctgggtgggtcggtgggtgggggacagacaggagagggctgagcttccatggacagtggctgacatttgtcatcccagaggatctgcagcatctttagatgtccttccatttgcccaaggctgagagagagagagagagacagacagacagacagagaaggagacagagagagacagagaccactcactggttagcagtcatatatccagaaagcagccacatctatgtagacattaaagctggagggttccacagcacatttaggcttctcactagagagtgcttttcagggtactgtcaccagccagctctattgcaaaggccccgagtttagaaaaattgttaataaaaggaccaagcaggtttctgtacctggtcagtggtaaatctctctctctctctctctctctctctctctctctctctctctctcacacacacacacacatgtatacatatatatatatatatatatatatatatatatatatatatatatatatgtatacatgtgtgtctatatactaggggtagatagttgacacctagagatatgtagtgataggtcacaggttctgactgagctggtagaagtagagagggggtgacagaggctggtattaagaaatcaagatatggtgtcttgatgtcagggtgctctcattgactgcctcccagtgtgcagaacgagagtgggggagggaggagccggttgtatgaacgagcacagacttaacctttctctgtctctttgtccatttaaaatacggagggtgacaaaacgcgctgaggcgagagtctacttagatgcaaacgtgggggtctgagtgtgttatcaatccctttaactttgacaggtggctcaacccgctgtttaaaactggtcataagcggagactggaagaagatgacatgttctcagtgcttccagaagatcgctcaaagcacctcggagaggagcttcaacggtaagcagggggcggcgggaggaggtgaagcctgagtgtgcatgcgcagggtggccccttgctcgcagggtggcttggaggaggtctgacctcttcccacgtcccttgctctgtctggagctttaatgtccccacgttgcacgcctcccttcaggttgtcctgtcttggtctgacttagtgacttggggaaagaaaacctgggttggggctctataggtcttgatggctgagatctgtccctggggctggtctcaccagagcagtaacctgccctctctggctgccagggctgttgtaatccagcagagctcggcagtgacctgtccccggagatgtctccccttgaggtctctctttctggtgcaacagagtctgcctcacacatctttctgggtccctcgggacgagccagtgtttgtatagcatctgcggggtagccctgtcataaacacttacctgtccttctgcccttccgttttactcaacggcagtcctactgttcctgactccgcgtttgtctcactgcaggtactgggataaagaacttctgcgagccaagaaggactcgaggaagccctccttaacaaaggcaatcataaagtgttactggaagtcttacctgattttgggaatttttacgttaattgaggtaaatgttagtcatatcctgactgctgtctctgagtgggtttaccaggaggaggcgtggagtcctgacggtcgatcattgttggagtgagtggggaccagcaggcagaatgagctttgaaaatgtcttgggttcagggaggaagcgtggtgatgctcattatcacatctttggaatgggtgatgctttggtgactgaagctgaagacattgccgtttcttctaattaaagcgcagtgctatctcgcagctgttaagatcgcttactgctgttgcagacatctggagttcagtccccagcgcctacagggtggctcacagcccttcctgaggtccagttcacggagagtctccgccatcctctgacctgcatgggctccagcctatacgcagtacacacagattgcaggtacacacacacacacacacacacacacacacacactacatacatcttaacaaatgtttgaagtccagtctcacaggaagctgacagcacctctgagtgctggtgttcggtgtgtaaattcaccttgtcctctttgatgctcatgaggaaatacatttggatcagagcccagaataaccagtgcccaataagtaattgttaactgaaccatgccagatctgataaatgccttcctgggagagtattgtcaactttcccttcccaggtaaacaagacatggtgtcatgtgcccgggcttgctgtggggccctggagtctctcaccctcctgctgaccgatcgttggctgggcactgagagctgaatctactctggccatggaccagcttcaactctcgtgacctcctgtaccattcatcctgggttcttgctgcggagcagattgctggtctgacgttgagttctggtggtatggacttagagagagctacagcgctcattccctgataaaccaaagctggaaggccatgagtccttgcagggtcacccgttagtcagatagtcggctgcccagtgggcagtgcctgtgctggtcaatggtctgctggaggggatcctggaagcctggctgtgtggcttgtccttctggtggcgtctttaagagaaaaatgttatttgtatatttatttacgtatgcgtgtgtttataccacatatatcaggatgtctaaggaggctgggagaggaggtctgagccattagaactggagtcacaaggcgggtgtgaatttcctgacagggatgctgggatctgaactcgggtcctctggaagagcagcaagccctcttcatcactggtaccctataatgggcttaagagtgttggaggtctcacaagtggctggacatcctatctatggaagttgcagctctgtggaagggtggtctctgatgcagtgaggtgaaagctgtcccaggtgtctttgatggggtgaggcaggtggctatccaagcaggagagtgcgctcttgctgagcacgccctgtgcatgttgaaaggcacagagttctgttctatggcctcggagaaaggtaatggaagtgcttggttccagagatcgaccttctggaggttgcaaaggtgccaccatccttgttccggacatgagtgctctctttgagagggcagtgcccactgcttgggtgctgtttgtagcttggagaaaggtaaccttgtgatgcagaccacatgctgccccatgttctcttctcccccagggtagtcaggcccactgtgcacctgggtggcctagacggagggaagcgtagtcaggcgggtgggtgcaggcaagaccttggtcggcagtgcactggccaagaacacacatggagacagggttggataattggttcagttgattgggggagcaagttgttttgttttatataaagataaggagagaaggaatgtgtttggtggaggtgtagtcannnnnnnnnnnnnnnnnnnnnnnnnnnnnnnnnnnnnnnnnnnnnnnnnnnnnnnnnnnnnnnnnnnnnnnnnnnnnnnnnnnnnnnnnnnnnnnnnnnnnnnnnnnnnnnnnnnnggaccagccacatgatggtatagtatagaatagagtttatctagggcatggggagagaggggttgggagggtagtagagacagagaaagggagagagagagagagagagagagagagagaggaagagagagaggaagagagagagagaggaagagagaggaagagaggaaaagaagaggtagaggccggccatgggcatgtggagagagggggaggggaatggggagaggggaagcaggaacaagagacagagcaggagcaagagagcaagagagagaggaggggcaagcagccccttttatagtgagtcaggtacacctggctgttgccaggtaactgtggggtggagcttagacaaaattctaacacaagggctatttaaacctttggggtttaagtaggagctgtctgtcctgttgagtgtccatctctagctgggacctgggtattggggatgcctcatttgcataaggaggcattccaggtgctgctggacatgaccttataaagggaaaggaagtttaaccccggccttgtggcctcctcaggtgaggcaaagcggggacccaggactgtgtgcactggggcatgcaggccccaggtgggggtggggatcctactcctgttcatttcaggataagatttaggggtttggacacacctcagccctactcttgctcggggtttgtccccccacccccatcccacggttccctggccccacgagtgggggtaacctgagggtgggagagagtgcaccctcaggctcctagcccggttttcggtttgctttacttgtgttgagcgtcacggggatggtattttttacatggctgcagaaagtctgagtttaaaatgaatagcacagtgagctgctgtctctgtagccgccttgcagagtttcccggtcaaatgcgctgcacaaccatggctagtggaattcctctaggaagctccggagtctcaatatgtgcttgggggcacaaaacagacatctgctaagtgccacagggaccaggggcttcagggtggcttcacataggtgtgccatttcttggcgcatccatctgcccccttgttctgtagtttacagctgtaatcaggcactttacattctgaaagcatcatggtcttgaagcaccctgagtctgggtctgtccctggcttgtggttgtccgtggtgtcagaggctgccctccctttagttggagtcctgagccccagatgtttacccagctgacgtgtcacagtgagtgtgggtcccgcttagtaggtcagctacagaggtgcaggcagcagcagctgggcgagagaggacagctatgctgaagtgatgtcagttttgtcccatagtgatcacctttggagccgggaagggcaggaaggcaggaagtcctgcgacagcacagtccgtggaaccctggctactcttttaggaacctgcttattgaaaagtcatggcagaagagtagagaagggggttcctggggaacccggacattctccccaggactagtggcagcgacagtgacagtaatactacttatcagcaggaccagcagtgttcatactctgaagctgtagtactctttggtgttactatcagtagcaatcaatactcctactgtgctggctagttttttattaacttggcacagcgggcctcgtctgaaagtagggaccctcaattgagaattcctccataagttctgtccattgggcattttcttagttagtgattaatgtgggagggcccagagcattgtgggggctcccatccctgggccggtagccctgagttttgtaagaatgcaggtggaggaagccagaaaagcaagccagtgaggaacacccctccatggtctctgcagcagctcctgcctctaggttccttccctgttggacttcctgtccttacttccttcagtgctggagtaaggatgtcgaagtgtgagccgcataaaccctttcctcctcgagttgcttttggttttttatggcagcaatggtcaccctgactaggacaatggagtgcttcccagtagtggtagtagtagtgatagcagtattactaggacccatgctcaatgcggtgtaggtagtttggtagtaatagaaagctctgaaccacgtgtccgccctttatccaagatgctacttttatcccagtttttaggaactgggtgaggtaggaggtattcttagtatcagtcagtccctcactacgagcttgtcagtttctcgtgctcagggccaccccagaaataaatgaaagagctgagtttctgtttcaggcgctctgagatgagcccaggccttctaggctggggctgatctaactaaggtcaaaaactttgcccttagcatcccaagtggctgctgtttgatcttagcctagggataatggtgcagagatggcctcggggcagtggtggcacatgagtttgtcaactaggatgcggtccaggttacagtgtctcctggggtcacaaagtcatatgcagtacaggaaagtggctgtgactggtgaatcagtgtgtcagtgcggtgtgtccagctggacacccatcaccacctgtggttgtctcacatacctgttcagcaccccctgttactgcactcagcgactggagtggactggtgtgatctgggatggcagtgcgattaggagaccctgatgccccgggcagaggctgacagctctgtttttttaatgagcccagggtcacagagtatgtgccatttgctgggacccagatcaactgctactgagggcagctcatttgctctggcttctgacgctccgtcctgttggcctgccgggtcagtccaggcattagggattaggatgatgggtatggtagtgcagtgtgggagctggtgtgggcaggctttccctgtcagacctcttcccttgccctgcctttagatcaggtctttgttggtttatgatctaatactgggcatggatgcttcgttcccttgatggacccggtgaccagtcctggaggtcacagtgacattgtgtctctaccatgacgactagcagaccttctaatgcactgaaatctggggagctaagagtcatttgtgttcggataggaaaacctttctttcttcctactccctgccagcaaaaggaagcgggctttctaatacaaatactttcattttcatggactggttggcctattgacgctgctgatttggagaagtcagagataattttatatggggtagctagcagtgatccagtcacgtttcaaaatccacgccccgatggatagggtgggtgtggtggcaaatgcctgttactcaattagctgggaggttgagcaagaggaagagagagttgcaggtcagcctgggctactgagtgaagcctgtctctgaaagccaagacaccacgtttggatgatgtttaaggttacacctgttatacgtgctcctttatgcatggctgtgatcccgttcctgacaaacgcaaacgaaggcagaagtgcttactccggcttggtagtaccgctcacagtctgagggagcacatatctcatcacggatggtgagcgcgttggctagaacaggagacagttggtcatattgcgccatagtcagaaagcagattgaagaacccagctctctgctcattgctgtcttcacatgcttgcccagaagtttgtctcctgggtaattctgtatcccgtcgggttgtcagtcactattaaccctcacaggttgtgtgagccacatggggtgagctgttagattaacagctggttttacgaggcgatttctcatttagtgatctcggctccgtgttgttccgctggacttttgagttttagagagcggaaggatgaacggagtgtggcatcttgtctctctggtgcctcaatagcacaaggaattattctaggaagacagcacagctgtgtgagccacccaccccagccgggccttccctaggtgctaacggagctctgccagagaaaaggtggcgaggaactggtgcagaagccttgcgtgggatttctaggtggtgctccatgttcttctgtgaagctgaggactgtggagaaaccagcatgatcgtgactttggaacacacccgtgcaggtcagagaaagccagctcggagcatcgagttccccgtaatctgtcccttgtgtgcacctcctaggaagtgccatggggacagagatgactcaccatctggagccttactgtaaagggagagtctgcacagcctgcctcctcacgtcattcaggcctggattttgagttatgaggtgtcttgcctgtgggagagtgaagttgggggcatcaaaggagcctcaggggactctcctgcatgtggagccagtcgtgggcaaggcacggcatggttgtttaagtcttttttttttaatatatatatttatttattgattatacgttaactacactgtagctgtcttcagacaccccagaagagggcatctgatctcattatggatggttgtgagccaccatgtggttgctaggatttgaactcagaacctttggaaaagcagtcagtgctcttaaccgctgagccagttttccagctgtttaagtctatatatatatatatgtttatagtctatatagtctgccagcttcatctgtgaagttggcctttggccaagactgtttgtttgtttgtttttgtttgtttgttttaagacaaggtgtctctatgtaactctggctgtcctggaactcactcttgagaacagactggccttgaactcagggatctgcctgcctctgcctcctgagtgttcggcccactgcctgaggacttttctctttttagggtttacttttattatatttgcatgagtgtttcgtctgtctgcctgtctgtctgtgtaccacatgcatgtagtacccatggaagccagaagagagctttggaccttctggagatggtgttggagactgttgctaacatggtcaaggctttccccctgactgtcgctcgtctgggtggatactggagtataggggatcctggaggctgccatctgaggtaaccctgcccttatccaaggtcagaggtcagcagtcagttctgcctgtgcctttgcttggggttgattcctgagatgtgtccagggatgcatttcctggctctttttttccaagtggctccaactttcagctcaacctaggaggccattgatagagaccaagagggagatgacccaggcagggagaggtggaccacgccttgggaagcaggtgtggtcagctgtgtgtgccccgtgggttcctggacactctgacactagcttatttagtgttgacagtgatgactctgagtgagaacccagagaaaatgcttttaaacactttctttaaaaagtcagaggatccattgcttcactggagaaaggttgtattcataatggtaggagattgagaccagccattaagacactatcctcaaatggggttctccaggcaatgcccaggaaactctgctttcataaattaacatctcttgacaatccttgtgttctgctaagactgtctgcaagcagtgggatttgaaagccatttgtgaaagctgatgtcttagccactaattacagtgtttcctcaggcctttgaattcagcttaatttttgaacattttgtgcagaggattgaacacatagctttgagtgtgccaggctctccctctggcactgaggcagcctctctcacacctccaggggaggcagatgacctcggctgcaggtggtcggctcagaaggggttttaactctcctgtgcccactcctcggagggacagcgggaggagggaacttgcttgtctttactctgtttgatttcttgctcagctgcttgctgtcagggccaagggtcatgggacattttcttttttaggcttttaggaacattccaaagccacacgaccagaatcagaaggccctgcttgtctctaagccacgcacctgtaacttatcagctcacattgagacttgagtcacccagggccctgcttgctccgttttgaagccgttcccacatatcacgcctgttatctaagaacagttcaatttgtacctttaagagctgagctttccctgtggagtgtcagcaccgttgcctgcagacgcattaactcaagtctgtgcagacagcgtgtctagccatagctcatttccctctcttagggttttgacctatattttattgattcttttgaataccactctgttgccaactagggcttttgggctcaagtgttctttctgcctcagcatcttaggtagttgggagtacagggcaggcatcagtgtacctgacattcattcattcattcattcattcattcatttgatgtatcttttcttgtgactatgtttataggtatacacgtgagtgtgggtgtgtgtccaatgtgtacagtgtcagcagatgtcagaagagggcgtaacgaggtacagatggttgtgaacctccctacctggctgctggaacttgagctcagacccttggcacgggcctcatgcactcttagctgccagcccaattcccaaacaccgtttttcctagactgtggactggtccagtgaggtgcatctcgttgacaaagatggctttggattctttttatttcccggtctgcccctcactctgcagttacgtttactgtctcgctgtttttgaaattgagagcactgatttgcttgtttagcggaggttcccgtcgcctgggttggcccagtggcattgccctcctgagtcattgaacatgttccctgccaccaggagttgtagataagaagtaaagtgactctccagaccctgcagtatgacttaatctgcaatgctgtgtactatcactactgtgtgctaccattactgcaaggggcctagcatgtgctaccatcattacaagggagctagcatgtgctaccatcactgtaagggacctactgtgtgctaccatcactgcaagggacctactgtgtgctaccatcactgcaagggacctactgtgtgctaccatcactgcaagggacctactgtgtgctaccatcactgcaagggatctactgtgtgctaccatcactgcaaaggacctagcatgtgcttgttgtttccatgtgtgtgatgctaggagatgttcatgatgaaggggggctggctacatcatggtgacgtggcaattatcttattagctcgaatcttctcataattggcatgtctgccctggatagcctttaggttaccccggggtacaggatgtatagaaaaagcaagggaatttcttactacttttctcctaaaactagttttcaaattgggagtggttctttttttttttttttttttttggtttttcaagacagggtttctctgtatagtcccggctgtcctggaactcactttgtagaccaggctggcctcgaactcagagatccacctgcctctgcctcccgagtgctgggattaaaggcgtgtgccaccaccgcccggctgcgagtggttctttaacgttctccactgaggccgatgagctttttgttggctcagataagaggtcatttttgaagaaggctgctgttcttgttttctgtgctgcatccctattcccctttaagagatgatcgtgttaaagccttttaaatagtgtgtctgtgtgtttgtgtacgtgtgtacaggtgagcgcgctcaggtcagagaaagtttttgtgagtcagtgtgctcctccctccatgggttccaggagtcacactcaggtcaccatgcttgcaaggcaagcccttttttacccagtgagacatctcaatggctagaggtcacttgagcagctagttatgaatcatcttttcctttaatgagcacagtgctttcctgaacgttgactttcccccgctgggctgagctgcagtgcttttgctttgtggttttggaacctctgggttcctgtgtgctcttgtttgatgcacgccgtctggaagcattcctcactgaaaccaaccatggtctcgaaatttccacacagcatgtccagcatcatccgtctcatccagggacggggcggggtagacagtagtgatgctcgcccgtggctggtttctgctttcaggaacctcctatgctagggacgcgcaggccccacactccctgtcactggaatctgtgattagtggcttatgcgtgtccacctgctttgtggtctcacggcgaatcgaccatgcatctcggagatcttggtctgacactttccccagacccgctgtactcccattgtctctgatctttctccactaaagcttcgtttcctgttccctcctttaagtctgccgcccactcccttctcccacaggttcattgttttctatgtttgggtttcactacagcatgattttctctgacagcttctttgttttcctttttatgacaaagatcagggactgtgaaattggacaggaagaatctcaggtcccaaaggaacatgaaagaggccccaggccctgtggggacaatgtcccatcaagccctgtgtagtaagttactctgcaaagcagagcggtttgcccaagtgccaagtgatgcatgcaggctgatgaccaaatgcgccattgagaaatagctgccttcaggggctcagaggcccacacagcggtgtccaaacctgggcctcgtaccccacgtagctccgaataactatgcctgagccccaacacaaaattgtaaacttagttaaaacttttttaacttcttttttcctgtgtatgtaattcttttttctttataaatggggtggggagtctgggagacgggattgtgtggttctaaccaaattctgtaggtgacagtgtggacctggactcttagcactttcatgagaattcagctgaacgttttggtgacaaagggcaggaagctttttgggtagggcacagaatggaatgtaagataaaggtaggacttcctttgagacagccttttctgtgtcgttcaggttagctccaaactcttatcttcctgcctccacctccaagttctggggttataggcttgtatcaatacgtggagaaagttcagtacattttcattgtcccttccccaggtcccaggaagcttaattctgttcagttagaagtttgacaagcatttttgtagttgcttcattgtttcttcctaggtgagggttgggattagacctctctaatcctccagctcattggaggagggtaaggcattggctaacaccgacccatcaagagcccataaacttaaggggattgttagaaggcacaacccagctgggacagacacacagatgattctgcaaaggagacctgcctctagtggctacctcttttcctgtatttaccaagccttctgttgttttctctgacactctcatggtccacgattcacacccagtcaggagaattgtgcagcagacgacaactgcaggcctgcatttggagtctcaggcaaagtggaaagagttacccctgggctcctggtgaagggtccaggctagcgtgctctggcccaagctgtcctggcccaggtttctgtgtgaacagcatggcctccctgactctcaggcttctgtcttagtgagctctatccagccactgtgatcacggtgtcaggcactcttgtgtgactcttgtgtgactcctctgtgcgtcctgatttggtgacaggtgtgaaaaggagcctgagaccctggggtctgatgaccttgtgaccttcactgtaactcttccattgaagtagaatgtctttctgtatagttaatagatccttctgtgacttctttggaaggctgtgtgtgtgtgtgtgtgtgtgtgtgtgtgtactcgtggactcgcacatgtatgtgtaatacagattgtgatatttggtgtgatatttgtgactgaggcatctcctgtaaatgtcctgattggggcccagttggttaggatgacccgttagctttctgtttctgttattcctcttctctctctccgtgctaggtctgggttaggctcctcacttcgtaaggatagaaaatggccgtgaaaagcaggcttctcggctgtctgcctgtctgtgttgctgggaaggaaaaggtgttcaaagttaagtgtttgaaaggtttccaagcccggctttctgtccttgaggaggaggaggaaatggtttgggcctctgtgtttacttttggtggcttggatttgcagtgagtgtttgcttttctttcctgggggacggaggaagtgggttaaggagggtgagtggcctgagtcaggaggaaactcaacaggttgggtgctgagttcagattcttccatgctggccagaaaatgcctttccctgagctccagtagacaaatcccagatcctcccacctcactggcgtagggttttaatatttttgttttagagaatggatggcgatgagaattgatttataatcatcatcattatgtgtctagtgatgtctagtgctataaggctggtagagaacaccgggctgatatcttttagccagccatttatgacatgttcaagctttgactccaggttgcccgagtgaaggtgctacaggaggcacacctcagtgtctaggggatggaggcaccgtaccgcctccctggggaccttgcaagccttgcaccttttttttttcatttttttttttttttatttattaggtattttcttcatttacatttccaatgctatcccaaaagtctcccatacaccccccactcccctacccacccactctcacttcttggccctggcattcccctgtactgaggcatataaagtttgcacgaccaatgggcctctctttccactgatggccgactaggccatcttctgatacatatgcagctagaaacacaagctctgggggggggggggaggtactggttagttcatattgttgttccacctatagggttgcagaccccttcagctccttgggtactttctctagctcctccattggaggccctgtgatccatccaatagctgactgtgagcatccacttctgtgtttgctaagccctgccttgcaccttttaacacactcagtagaaggtctgctgtgtgctgtcatgcagagcctgggctgagaaaggttacaagggtctcctttttgacctgggttgtgtagatattttagctgatagtggcaggaggagaaggaggaggaggagggnnnnnnnnnnnnnnnnnnnnnnnnnnnnnnnnnnnnnnnnnnnnnnnnnnnnnnnnnnnnnnnnnnnnnnnnnnnnnnnnnnnnnnnnnnnnnnnnnnnnnnnnnnnnnnnnnnnnnnnnnnnnnnnnnnnnnnnnnnnnnnnnnnnnnnnnnnnnnnnnnnnnnnnnnnnnnnnnnnnnnnnnnnnnnnnnnnnnnnnnnnnnnnnntttcctttttggctacttccccgcctccctcccactctcccccaccccttatccattttctgaaagtatttttttgggcggggggggggggggacgacgactgacagttgtgctttaaacttgtgttgattctaacttgtgttgagcatgcacctggaccaatcacagtgcgtggatgtctttgagcctgtgggttttttttttttttggggggggggttgttttgtttgtttgtttgtttgtttttgtttttgtttttcgagacagggtttctctgtgtagccctggctgtcctggaactcactctgtagaccaggctggcctcgaactcagaaatccgcctgcctctgcctccccagtgttgggattaaaggcgtgtgccaccacgcccggctatgaacctgtgttgagcttctacactgaccaatcacagtgcgcgcatgtccttgagcctgtgacttttgagttcaagcaggttacaatgctcacttgctgtggtcatgatgatcgcagtttcgttccccttgggagggggcaagtgacatacgggtatgaagcttgtactgagcaatgttgatgtggttttatagctctaatggatgctatttgttttttgttctaggagggcactcgagtagttcagcccttatttttagggaaaattattgaatattttgagaagtatgaccccgacgactcggtggctttgcatacagcttatggctacgcagcagtgctgtccatgtgcacgctcatcctggccatactacatcatttgtacttctaccacgtgcagtgcgccgggatgaggctgcgggttgccatgtgccacatgatttaccggaaggtaagtgacctggcttgtcggacatgtccttcatctgaagtttcccataagttagagtcatgtaatgaactgggtgttatggcccatgcccgcactcgcaggaaccggaagagggaagatcacaagttcaaggccctctcagaccacctgacaaaacctggtcataaaaaccaactgtttgaaccacacacgagatgcttgctgtttggtttgggctttagaatatattgttgttattatttattctgcaaactttccctgctataacatggaagtctcttttcgctgtcagactgtggttgcttatggtgcataggcagtctgttggatttagggtgaaatctaggttaaaaaaaaataaatgcagaattgattttttttcacagctaaatcttatagcttttcctttgacaagtcttgtgctgttcactaaagtcttcacggcatcaatgttgtgccaaacattaaactctgggggagcagggtctgtagaattcaacctaggagaacacagtgtctctgagaaaggaaattagggatttttatctttcacatgcttctggagctgtaggtgggcttggctgcctgtacctgtgtacccacctgtctctttttctatgtgtgtgtgtgtatatatatatatatatatatatatatatatatatatatgtgtgtgtgtgtgtataggtgtgaaatgtttaattatgttcaacctaatgttttcaaggaaatatatcagtacggggcatattatagtcgtatggcttggtataacacatgtactttaaacttagaaaagtagttttgggggatgaagaaataaatagttcagtggttaggagcattggctgcttgtccagaggtcccaggttcaattcccagcacccacatggcaactcacaactgcctgtaacttctgttccagggggactcaccctcacacagacatacataccggcaaaacaccaatgtacattaattttttttttaagtagttttggagaaaactttagttcccaggtaccttgtcctgatttttaaagtgtgtgtatatctttctcctactgaagtcgtagcgataggtctggtgtgatacagctttgtgctggggctgccacactattcctggctcatgcggattggaacagttgcgaaggatgtcgataagaagcctccaccgtcagatgggtggatgtgtgtcattggaagtgtcagggtctgatgactctgtcaaggctgttgtatggcaactctacctgttttttttacttttttaacacacaggcattcgtgcgtgtgcgcgcacgcacacacacacacacacacacacacacacacacacacacacacaggctcccaagagcgtgcatgcacatggttcttgttgtctgaagacccatatcctctgcaagagcatgaagtgttcaaaatggctgagacgctttgctaatttgatttagttgtgtggtggcattcggatgacatccggtgattgaagtcactcattgtttaccagtctctggtgtatctggaatgcccatggattttctcagcaaatacgaagtatccctggcacctcttcttttgagcagtcttattaatcttggcgttgtgtggctcatgcaggcccaacatccttaggctctgacaaagacagtgttctcttgatctgtgacatggatctggtaatggtgtcttaggccttcactgccaccaccatcctgtctgaggcttaatctagtaccatacaggagaatattgaagtttctccataaattgtcacggttttaatcttcctggatgccattagtcccccttgtacttaggcattttcattcccactgtggtgcacaccataattacacagtcaggtgtgaggtgtccgttcaggcagtcagggctcctgtgcaggggaattcacttgttattcttcttagtttctctgccaacacttcggaactggcctcggggaaatctgatctagcgtggcagatttgttcacctgcatgtaagtaaacgtctctcagaggtattcattggtcagtatggttatcccaggaaaaatctctttatgaagtcctgagttgctgtgctcagagattcagcctgaaaccctagaaacgtgggaaagatgaatttcctcttgccagccttgcgcaagaagtacgctgaggtgaagtttaagatgctttctttcaggaggatggcttccgggaggctgaggcgggtctgggtgtgtatctgctaggcccttctgcacgtgctcggagctcacgtgaggcttcagtgcctgatccatgatctgaggagaaatcggattgggtggtatacacggagtgactgtttctatcatcacggtagtgtgtgttgctgaatgacctcgtgggatggatcgtacataaaacggcttgttgatctggagaggtggctgggtggataacgagaatgtgcttcacatacaagtataaggaccacaccgttccccaggccctatacaaaagccaggtgcacggcagcttgacctgtctgtaatcttagcacttaagaggtggacatagggcaagttacctggttacactcattaaattggcaacctctgggtttattagtgtcttaattagggttttactgctatgaacagacaccatgaccaaggcaactcttacaaggacaacatttaattggggctggctcacaagttcagaggttcagtctattatcatcaaggtggggacatggcagcatctaggcaggcatggcgcaggaggagctgagaggtctacatcttcatctgaaggctgctagcagactactggcttccaggcagctaaggtgagggtcttaaagcccacacccacagtgacatacttactcaaaccttttaatagtgccactccctggactgagcttatagaaaccattacactgagagacagtgccttagtacattaagtaaagaagaattcataaagaacctggtgtctctgatctctatgcacctgcacatgcgtatgcaacatgagattagccatccatcatcactaagtcaactaagcaaacaaataatgatgaaaagcaacatgctcatattgggaagagggacagagaaatccattctcacactcacacacacacacacactcacacacagatagagagagacagagagacagcatagagagacagagaaacagagagagagagagacagacagacatgactggtcatgtatctactttcacagctttaataaagttatgctggtgctggagtgtcatagtcattcgttttggaaagttaccgtgagttgccagccccattcccgggagaattgctattccctctatgaggagactggtgtcctttctttactagttgacagagacacagaaggaagggacatgtcagcggcttcaggtcacatagggtttgtactttggcttcagtgtgagagaagatcagactggactgaaatggcagatctagtcaaggcgagaatgagctgaaggcactgggaccctccatccccagggcctcctgggctttggtctctccttttctcagacctcggctcagaccttcacagaatttaatttcacaaagggcttaagtaggcactgcatacacacatgatgatggtctcaacaccaaagagggtctcactgttacgctcttccttatagaatatgcaaggcacagagggtttctcccctgagatcactggcttagtcagctgggggcctcctgactttgtgtccctgaagacccgtagcagttccctgttgggactgatttctgaggaatggattttgcgggtggctctcttgcctctgaatgctcaccccgttatgaggtccgttgctgagtgcatctgtgttagtctcttctgcttgctcggcagagcagactacctgatagaatccattctggatagaattgctagtcatcactaactttagagtttcatgaatggaaagttggtgggaggaaatgtgttctccattccagcctctgaggtgagctggctctgcgcacacctcagcttctcattgtagtcacacctctgccttcctaggatatacttccctgtgcttgtgttcagttaacaacttaagtcctgggctgcctcaggggattagggaaaggcaattggtgcaaagtttggcagtctatgatatcagatccatgattctcagatcaatggtgattttgtttttattttaaactaattttagttcagtgtggactatattgccttatatttagacaggacaatatggaatgcccactcatcaaatactttggtcttttcaaagtgaggaacatcaggtggcttgctctgatattttgtctgtgtagggaggacccagagggtgttgtcaaagtgaaaccatgtggtgtttatagcaagtgatactttggcaggacttcctgtcctcgtgttattatcttaacatttgacagttagaatgaactagccgtgctttgtacactgtcgtaatagtttaacgtttttccttctaaatcttttattattttatttttaatatgagcttgcatctggcctgagtgttttgtgggacattaatcctatcaatcttctaagagaatgctaagaggactgttttaatttctgtggttagagacataaactagcaagatgagggagtcatttgctcgaagggatgttactgctgctgcatctgtgatggacatacatggcagctgcctcctgccagctggtaactcagtaactaggtggcctgagagaaactactgggtgtagatcagtggtccctaaattgtgcttttttattggattcatgtggggaaatctttaaatcacccttgttgtgtccggccagcagaccacaacctgggttctagcctggaaaggcattttggaaacctggaagagaagaggggctaggtggcgagataaagaaatgcagctaagacaggcattctgatcaaagctcaattttactgttccacacgcagttatgaagcaggggaaggggcccgattcccgccaattagtcttggaatccaatagcagggtgaccacgtgcaaggctccgaacagcaaagcggcaggttccagcagtgggcatggcagaatgattgagcgggaagctccacccctgagcaagcaggtttcaggctgggggaggggagactacatctcctcccttttgttaacaaaaataaaaaaaaaaaaagaaaaagctggcctgaggcacaaaatttatttatgctcaatagctctgcctgaattctagggctaaagaaaaaacctgtctctgtgggattccctaacttttcttatggtaaactgtatctggcgaagactgtcctttctatcctagtaaacaactaacagaaaagcctggagctgtaggctctgactttataatgctaattagtactgaataggtaacttcctagttgaattttaagtagggcgttggaaccctggctaagtttggctgaacaaatttgaaatacactttattaagaataacactgagttgatattgctccgcagttttggatgacaggcgggaaacagggaggagggggtgacgattagctccgtagtacaaggccaattggctttttattttggggtgggaggcagtgaagatagtatggtctccaacctctctcccccctattaattaagttaaataaggcaacgcttaactgaggtgatcaaaagattttctcatccgtagatgagtgggcttttaaccttggcttgggtggacattgacccgattcctccagtgggtgctgtcacgactcacacctgtggctcttggtatcttttggggagaagaggcagagccgtagatattttttggttttttagccaaaattagataccgacctcctttttaaactgggtataacccacaggaaactcagaaatggtcaagctggaccttcccctgcagtagttctctgcaccaagcgatacccatactgtattcgtatgattacgaactagtatgcacagttctgagtactgtgcagctcctaaaggagaattatcaacctcagatttagcaaggcctaggcaagaattatgtcattagtaacaccacgttttgtggctaaaataggagctggaagtcgttcctcctcatccctgtatttcccacagcctgaggaactaaggacacgttgcagtaacagcaagggtgaaaagcctgaggccagctaagggactaagcccgtctatcagaataaaaaccaatctctattaatatttgaaatatctacttttctagccctcttggtaaacctaaatttcaacttagactgaaagccaagtgctggaatgtcctgggaatcaagatagcagttgccacctgtgtgctcttgggtgcgggaggatgcaagcccgctgcattccagcttaaggtgtagattgacctgcttgaaagacaaaaatcttagagagtgaagagtaacatcacaaagcttcttttggggaagttcaggtactttattcagttgcaaattgtaaagctaaggctagtctctggcctcctgtcgggtagcaggctcagagagtagcaggaaaacagcttttctgggagcttttgttcccagctgaattctaagcacaaaaggaattttagtcttcagaatgatacttacgagaagagtcagaatctgtgtttatctgacgaattaatctctctggcagccaccgcgctccatcttcatctcgtgaaaaaacacaaaccgagcccctaccccaaattagaactggatctggacccttccattcagtgggtccttccattttaccaatgcataagaagtagaagtaactggatgccagtggcgatccactgcagactgacctttaatatcagtttgcaaaatatttagaacaaataaggtaaaggcaaggtgggcctttggtgaccttgggggatatagctgtctatagttcccttaaaaggctgaacaatgatatctggctcttttccgaaataagttaatgcctgccttcttccagtgataatcatctgagccactgctttgtgatatggcaagatattacatttaggagaaatccttgagtgtatctacattataggaaatttttgctatagcagttccataggcacatgagtcatattaaagattaacagatgcaggggcaaggagtaatctatataagtgacaaattgctcttcaatagccttttccactagctgtaaggccagcaatccttctggggttagggatctaggggaagtgggggatgtgctctgaattaactttgctaggtaatttagaatataggaatctctaacattggacagactattagaccagtctaagattgagttagaatgactggtcacactgaagaaaagagaaatcattatgactctattaaatgactaattttactaagtcagaatatacagtctctgatgtaatattgccataaagttaaaaggctagaagctagtctaaactggaaaaatgacaagcaaggatggatctaaaacatgaatttaatttagttttttagtcatttcaatcaggacactgagtcaacttacctgccagctcgtcacacgaattaatatgtttttcagcgttctgtggagaaaacctgtttttccctctcccaataagataacggttttaggatcaatctataagccaataagtagatccctttaagatactataaagcatttattacattctttgacatttaaatactaaattttgaaaataaaagtaagatttaaatagtgtgcatgggaatgcactaaatagtatgtacggggatacaatttctctctttttttgtcttttaagaagttaaagttttaaaatttcacaatacctaaccttttgaattaataacttgttgacaaaatattttaaatacttggctgtaaaggggcagtgactaattgcactttcaatcatttttcttaaggagtggttgtaactagaaagctagcaaagttattaagagtcacatgtgcataatttatttattaactagaaatatgtacaagcaattgcaaatttgagaattaatagcatctgagggatgaacaattttaagcaattgtgagctcagagataaggcattgactattaatatacaaattaaggtttgattgttcagcattttaaaacaacatctacagcacacaactagattatttgtgctgaaacaggggaaactgtgtcttaagactccgccccacagaagctagttgggcccacgtgggccaacgatcggctgggaggatgagaaaaatgactttacaataatgttttttctggccaaagaattgtcttgggcacaactaatatttaattaccaattaataacaattataaaagctttctttattttttgtaaaaccttttgtagtaaactaaaaccctaagcaataaaagtatattgtctctgaatcctttgggtgagagcaaggatttaaggtaaacttcctttgagaagcattagttaatacttttcacttaggaaacaatatacactgaaagattaaaactcttggcttcttgtatagaagcagaaacaataaaaatttttcttacataatataaagttacattagccatacctagaggcaaaattttctagtaattaccagttcactagaagcaaaactctttgaatttaagcattattctaaacatctgaatagatctgcaacactgttaaaaagaaattttcttgaacacagggaaaaactttctcaggcactgtttgcaaaacaaaggaaggccacaaggcgctctggggctgcccagagccctgcattgactcaaatgtaaaatactttttaatctgagcatcctggccctcctgtaataaggaccgattctagagaaacaatataactgtctacgcctctaaattttgatactctttcttaagatgacttacagttaaaatgttcttcacaactttagtgttgtgaaaaaattgcccgtactgcagtttcctgccaggcagcaactatagccaaactgattgtctaatctattcacaaagacaaacataactagataactctgtcacagttttgtatgagctgtatgagcgctctcataagatgattactcttgtaattatcttaattacagtatacaggtgaattaaagatcttaaatttgcaatcaaactgcaagctgcagtcaatggaacactggcaattttaaccatagttttttaagtttcttgtgcaaagttaggataatacctataaccttgggaaagcaaaacccaagtttaaaacagtttatcatctttaaaatcaatattagaagcattactatcatattatgaagtttggatgtcagttaatacctatgaattcctattaaagcaagctttactgctttaataaagaggcattgttttagatcttatcttaaattttactatttaggataggaaccacattaattattatctaaactagaaatatctttagagacccagcctcttggcctgctttatgccacgtgtcggaaggactctaaacttgagttatcaaatttaacactaaccatctgtagcaatgtaacaattattaatcttaatcaacaactcatgagctgaatgtgaaaatatgcagagcacatttttaataaaaaagaaccaaatgaagcagttacatttagaccaatcagagaatattaatttttgtagctacaatcatagaataaaaggcactttaccattgtcaaacacattagtcacaaaccatttatcagcttttttaccccgaaactaagaggctgtgcactcgcccttatttcctaaaacgaacagtttttccagcaggggtcctcctgccacgtgtctgattcctggctgaaacacgtggcagctctcggctttgcagataaagttttttataccatctttattatccaacataaaacatagaacattcattcatacagactggacacgaacatacatgaattgaacacgagaacagattggtgcaccagacattagacgagacacaaaagggaacagagtactcctgctataaggcccagagagaaatttctctctgctttttgggacattttcctccctcatgatgcagtttttattaactgcggcaatccccctgtttattaatttccttttaataagccctttcttttctcacgcctaatgtagcttcggagagccacggcctaccgcctgttacagttcccagttcctcttaagcttcactgctgaacctaagtgaaccagcgctagggtttaacgctgtctcagcttagcccataccttctccggtatgaatttcctttatcctttaattattccatggagctccaaaccagcagtgtctcttccaaaaatcctttgccgtttctcagtctcgcattggttcgccaaatgtgtccggccagcagaccacaacctgggttctagcctggaaaggcattttggaaacctgcaagagaagaggggctaggtgtcgagataaagaaatgtagctaagacagtcattctgatcaaagctcaattttactgttccgcacgcaattataaagcaggggaaggaggcccgattcccaccaattaatcttggggtccaatagcagggtgaccacgtgcaaggctccgaacagcaaagcggcaggttccagcagtgggcgtggcagaatgattgagcgggaagctccacccctgagcaagcaggtttcaggctgggggaggggagactacaaccctgatgctggcttcaccctgtagatattttggggtgatttttttgtctcctagacaaatcctagtaagcctcacacgtacattcatcttaactttcagttcgtggtggtcgcctgtggtgtacaggttcaacctcctcagcagtgagcctcctcagcagtgagtgacagggctggatttgccggattgcaggcacatagctcagtcatgcacttctgtcagcctggagggagagtcttagatgggctggttctcctgtgaaggcgtgcctaggagctgagtcaagttgtccaggtcctgataagaggcacagtggcatgtcaggtaagtggacattgtaaacctgggatgacaagagttactagacctgaatttcagtctcatttttttccctgtttcaaattgtaaacattttagataggggagcatgttaatttctcccagccttggtttcccaatctttaaaatggcataaattagactcgcttgtcttaggactcacggaggagccagaggatgggcagcagctcccttcaccaactgtagctgaataggactccgctttccagtcttgtgtgtttgaggctctcgggaggcctggccttagtttttctgggccgaggttagtttgttctcaggtagggttcctttacgtcagctctgtctgctggaggtttgctgctgctgttgtgttgaatgtctgtcaggaacagattcaagcgggtggtggtggtggggttattttggcttatgagtttggacacagtcatctgtctccgtgtttccccaactgcctcccctgcgttgcctctcctagtgaccttgttccttgagtaggccacagctacagcttgcagaacatcagaaacgtgccactttgtggagaccaagtgctcactctgtgagcctctaaggcacatcattagtgttctctcctcaggcggtgctgccctgtgcattgtgggatgccgaacaccagagtcctttatctcggagtcttgcacgctgcctgctttctgttatctgcaaacactggcctcatagtggtcctgctctgttgccttttatggtggagcaggaggagtgggctggtgtggtatgggcttgttagtccagatgtttataaactacagagctggaagctctgtctgtatagtgcagggtacggtggcaggacttgctgggcatagtccttaccttccctcggggcagacggagtgaccacatgtgtcagaagagggtccataggttttgtcttgagtcacactgctgttgtcgtggaaggtgacaggcacagtacttgagggtcttgtgggaacagatatggcctccttgaaagggacactacagcttcaactctgccctttttattttaatttttttttgcctgtgttcactctgaagtcacagcaaatgatgttaaaacatttctgacagtaaaatcatcacttcactgactgaaatgaatttccatcctgttccagcttttaaggcacctttctgggtttaatgtttgtagcgggtggctatctcctttccggttctcaaaggtgagttggcttgttttcagaacattcaaagcacaaaacaaagtcttgatccaatacacggatcgtttcaaacacagcccgcccagatatgccgcactcaccacattctgtagccaccgctgccattgttcctggaatccctttcatcttgcaaacccaaacctctgtaggcactggataccgactcccactctccattccaccctggtccctagcaaccaccatcctgatttctagctctgtgagctggaccactctccaagcacctgatttaacggactcctggagtggttgtccttttacagctggtgtatatatatatatatatatatatatatatatatatatatatcagtatcactttgagtaatgaacttggtcatgactcttcaggaccagttcctgtgggaaaatggcagtgcggccacatgagtggtcgtgatgacgtgtctgctgctccttcgagaaaaaggaaagggtttcagagattctttcctgtctgctctaagctctgagaaagcaccatcttacctgtttgtatgtcctcgtctcttcccctgcactccccagggactcattagtagcagacagttattgtctctgtccccatctccaggaggttacagatgttagtctatctacatctgcttgataaactagtctttgagcccgaaggagtggggagatacagggtttggaaaaagtaacttgaaaatgaccatgtttcctgtagagggccacctgtgctgtgttccctgtagaaggccacctgtgctgtgttccctgtagagggccacctgtgccgtgtttcctgtagagggccacctgtgccgtgtttcctgtagagggccacctgtgctgtgttccctgtagagggccacctgtgctgtgtttcctgtagagggccacctgtgctgtgttccttgtagaaggccacctgtgttgtgttccctgtagagggccacctgtgccgtgtttcctgtagagggccacctgtgccgtgtttcctatagagggccacctgtgccgtgtttcctgtagggggccacctgtgccgagtttcctgtagagggccacctgtgctgggcctttctctccatggccttgttcttcttcttgggaaaggttagggattggtgcttctgagaagtgtggtacacggtgcagtgtgcagtacttagactgcatggcctgaagtccattgttctttttctctcttggcagaagcaatgctccctactgatttattacttacaggcgtcctcaaagcttcaaacatggctttgagggacaggaatgagtgagggaaccactcattttgcaatattaaaacgtctgcattgttacttatagtttatgatgggtgaccagccacccacacaagagtgatactttagtaaacacacaaccttagggtgaaaagtaaaattgcattcatacacacacatacacatacacacacacacacacacacacacacacacaccacagactcacaagcatgccaggcacatgcaaacacacacaagacacatgcagagaaatgcacacatagacacatgtgcacatacacatacacacacagacatacatacacagacatacactcatgcactcacacgtgcacacacacacacacacacacacacacgttaccgtgcatgtttgggggtcagattacagtttccggggctccccactcccttccagcattggggttccaagggatcactcagcttgtcttggaaactgccgcttttacccacaagccacctcgcaggcccagtattttccttttgactgattctcagtaaaactatatgccattatacgccatggtaagtcaggcactgtcacattgctctatccagttgctcttttgtcctgacagaaggcatatgatgaaaaaaatactgaacatatagtccaaaatgattgtgcatatagttgttatacaggagtcggttttgagttcacatgtaaattttcattattaaacatgctgttttccagaagaaataagatataaacccattttgtagttttgtgttttagaggcaaaccagaaagaaaaacataccaggattcttagaggaccgtagccgcttgtctccttgtccctccctgaaaggttctcttctcaccaaccttatctttttgggctttctcacactgttgcctataactcagcttcactaggattgctgcggcctctccttctctttccccctcatggggcttctcttcaaacgtaggaattggtggcagaagggtgtgcatgagagagaggtctttctgctgtcttgtggagctgtcttttcgcttcggacagactgccgtgagctgtgcagtggcagttaaccgtggagccggttcagtggtgcgggtttgctgtcaccctgtactgatggctcgtactcgtcaaaacacttcttcttagctcataattaggctttctaaaacgttcccgagtaccatggacacccggggagccctgagatcctgcgtctagcatcttttctgacatcctatggttgcagagcgtggttgtccatgctttgacctgggctcccaagcctttagagagtccgacctcagggacccacggtggctttgagcaaacctcgtctctgtcctggaagtgggagaggcgagggaatgtggcggctcctgatgaattgcactctctgggatcgtcatgtgtgactgacactcagcatgacctcagagcatggatcccagggcccttccccgaagtgggggagtcaggtggggtcacatgcatatcctcacggccagacaggcgaggctagtcagcgtgtgcatgtctgatgccttagctgtggcctctggtagaagtggggtgaaaggaaagccatctatcaggtacctcatgcaggtgaatgttgcgtcgtccttcagagctggacagatctgctagccatagacagtcagataaagcaaaacagaaaagaaatccctaaggtgccagactatcagactatagcgagaggcaggttgttggttttgtctgcggtttttcatttccctgaaccagtttctctctccggaatgagagggcacaagcctggcctggtgcagccgttattctcccgttatgctcatcttatcgctggaggatattgggcagtccctgcagcctccctttgagaaacagcacagccgcttttagttgtgcaatcatgaagagggcgtgacagcattactaagcatctccagccagtaacatcgggaaaatccaggtggcctctgcttcagcgagctatgcagtcgccctgcatagctgcctgtcccagtaatgccccgcttacctggaagccaccttatctaacagactggggtggggtcacgaacactgcactctgaaggtccctcaggggtctacatgctgctgctctgccttgacccagtggtctcaatacgatagggagtcatggggactagtgtgctgagcctggtgacaggggacgagggagaatcgactgaggaatccaagcgcacaggcctgaggcattctgggagaagcctcacactgagggtcgacagcggtaagggtgagttggtgaggaatctgcagtgtgatcaggaggtgttcacacctgtattggcaggactgttagacgggggtctctagaaggtttctgtgaaaatggcagccggatacttcattagttatgagtcttccgctttagttcttctcccagttagagagtggagtctgtcaggaagggacggcctctcggtgatgtgggtgacatgaggcacatgccgctggcctcagggagcagggagagatgcgtatggatgctccgtcaggactcttttttttttgttgttgttctgtttttcgagacagggtttctctgtgtagccctggctgtcctggaactcactctgtagaccaggctggcctcgaactcagaaatccgcctgcctctgcctctgaagtgctggaattaaaggcgtgagccaccaccgcccggaaggactcactctttatgtgtccctggccatagacggtaggacggtgccacttacatgggcggtgacccacctcagttagcctaacctagcaagcctgtcaacaggcaaacccagatgtttccctctgtaattccagatccttccaatcaagcctagccctcccagactcctaaggggaaagcacaccccacccgtcctcctcggcagtcacttctgtggaagtgaaggacacttgtctcaccacgctacccacgttgatatgtggcatttatgtgcatgcttctgctttacgtttcatatttacagccaaaaataatccagataaaaacatagtttaacaatgaatgggcgggggtggggcggggggagactgtttgctttttaattttaatttttttaaatttatttttgtttatgttgtacttacttgtctatatggtacctcatgcatgcaagtgcccacagaggccagaagagggcatcacgtccttcaaagctggcagtggaggtggttatgggccatcccaggaactgaaccttggttctctgcaagagcaactagtgctcccaatcacatatgtgtgtgtgtgtgtgtgtgtgtgtgtgtgtgtgtgtgtgtgtctgtctgtctgtctgtctgtctctctgtatgtgcatatgtatgtatctgtgtcaccactcgcaaatagtcagagggcagcagaagtcatttctctcttctgctatctgatctggtgattgaacccagatccttggacttggtgggaagagcccatacccactgagtcacctcctggtgcacccgctgcctcctacccgacctgaccaggacgtatctaaggatcgtcgttcctttcccttcctgtctctctccctccatcctctccccggtgctgggatcaaatcaaagccgtgcacgtgatcggctgatgatgtctggcagagccatggcctcagccctcgttcctgtttctgcccgacggttggtttctcacctgttctccaggattttgactgggttgcatgatagtctcctatagcacgctcacgttgttctttcgattgtaaactacagaaataagaacatggtcttgtaataccagatatttgggaggccagagcagggtgttgtcacaagttcaagtccagtttgggcaacttagtctccaaatgaaatgtacagtgagggtttaggagtgcatgtcaatgatagagacgagagacgagattgcctagcctgtgcgaggttcccggtagaaccctagccttccccgattccccccgtgctcttagttactctgcaaatatccagtgggaacaaatgttaattggtagattttctttttagatttcagatgtatattttctactctagaatactgtttcattcttttcgatggtgtccacttctctcctaaaatcatccatctatccatttgtcgtgaccgtgttcctctttggctacatatccatgattccagcagttgttttatgttcctttgctaatcccacgagctggatatctatctgggcatctttctattgacactcaccctctgtgactatgggtcgctgtttttttttttttaattttttatttttctcctttgctcgttgtaacaatctctctaccatgttgcgttgggggtgttatactgcagggagtctggattacagagtgttggtttctgttttggaggttggtccctaccagagtggccctgtctgtctctctgtgcatctcagctgcaaggcggctatttccattctgaactcagtccaagggcctggccgactctgtagacagatctttatcactaatgcatggccttcctggcatcgttatcgaatggccgaggcagtcaggaagaaccttagctctgtctgggcgaaccctggcgtttcatagccattctgacctcagactcccactctggcactcagctctgcccctggacagcgaaggccttggcaaagagccattggtaaatccccacaaaaaatcccaggtctagcctctgtggctgtgacccataaactccacgtgcttctcctgttcagagtgggcatcttttttcgttggttggggaaatgcactctggttgggcagaaagccaggtgagtcctggccaatactgagtttccttccctcagggctcgaagtcctgcagtgcctgcagtcagagtgtggggacagctgcttcctgtgccgtccaagccaatggctggctgcatactggcgggcgaggccagcagactggcaccaattaatcactctctggtgacagaggacagagtctgccagttgtgtctgtgactgtcttcctcactgataatattaaaggcacgtcactgttctgttctttgcttttttccctctgatctcactgtagtgagatgggtttttaaaaatgaaacagaacatactaagtttgagactgattgcacagctctggtagcttctggaacagcctggctttccttccctgcagtacaggtggtctcagtgacaggtagccctgcatgagagagggtctgtgtcccacacagatggccactggggtctcactcatcgctgtgcgccctctgactgtgatgctgaggagacacattgcatgctgttctgacttttgttttctgtttagttgttgtgatcaatttaggattagagtatgggatgtcttttgtgtgcctcatttcattctttacttgttcatttgggcttttaaaatccaaggtctgtctttatagcgcagcctggcctctaactcaaccctcctgtctttacctgtagggtatagggattacaggcatgggggcccatgcttggttgtcatcttactttaactattagaactgggcatcaaggctggcatttgggaggctgaggcaggcggacctttgtgagttcaaggctagcctgtcgtacgtagtgagttccaggacagtcaaggctacatagactcaaaatatcaaaaataacaaaacaaacaaacaacaaaaaaataaaatcaagtattcattcataagtttgcagtgtgttttctgcatataggattgacacttgtttcaatataaacgtaggtgctaaaaatattttcacatagccagtgaaaagtcagtggccaaagtccctgagttctgtctctttctgtggtacctgtatactctcttcataatatataggctgctgttgtttttctttctctaaacatggtctcattatataggcttacacacacacacacacacacacacacacacacacacacacacacacagagaaatgggaaaaaaggggcttgaggctttattgtagccccaggttgggagagagcactaaacagaaaatggtacagtatgaaccaaattttattatattttttcttgaatatagatttttttctcatataatatattctaattatagtttcccctccctccatacctcccagttcctccctacctcccctcacatccatatccacgctctttctgtctctcattagaaaacaaacgggattctaagtgatgatattaatataaaacaaaacaattacactggagtagaacaggacagacagaaggaaaagaacaagaaaaggtataagaaacagataaagacacagagacccattggatcacagactcaggaatcctatagaaacaccaccagatatatacatatatatgtgtgtatgtaagcatgtatgtatgcattcacatggggggcagggcgtggtggtggaacctgtagggttaagaaaagagaaagaagagtaaacaaaagaaaccaaactccccagcaggacactatgagacaagacctcccagagatatggttaagttcccttcctcttggccaccctgttggccacgtggcctgcccttaagagtagtttgtttttcccagtgagattcccttgaagaaaactaaattgtcatttgcaagtggttatcaattagagattgctctggactagggatggggtgtgaatgcacttctactctcagcactagacccggtctcgtgcagacctgtgcagacctgtgcagacctgtgcagacctgtgcagacccgtgcagacccgtgcagccctgtgctcccatgtattttaactgtaacatctttattacttttttttgaaaacttcaaccatgcatgcagcatatctttaccatacccctccccactctttctctagatctctttctacctttgcccgacttcatgtcctcattttttgcttttttcttttttaaacatgaaatgccaatttgtgtttctcctatttgcatgagcatggtgtcgtccacggagtgtgtcttttctccaccttgccttgctggtctttaccttgttctgctgcctaggctggccctgaactttctgcgatcctcctgcctctgccttcccagtgtcagaattacagacgggccgtcttatggttggtaactcatgttgcatggagttacttgtattttagtgttgtttatatctggttctcctttgcctttacatagctgcctggtcattcattacctgttgccttggtgtctactgcagtctctttgttttctcttcatctggcaatgtggtgcactccagcttaaagttaaaaacgagctggagagttggctcaatggttaagagcactgactgctcttccagaggtccttagttcaagtcccagcaaccacatggtggctcacaaccatctgtcatgggatctgacgccctcttctggtgtattagaagatggctactgtgtattcatagaaaataaatgaatttttaacaacaataacaaaacaaaacaaaaacccaagacaaaccgtcttcactgttccaggttctcgttccgactttagctacttctctctcccctccaagatcagctttgggccttctctacttagccaccccacctttctctcctctgtacgtctcacaagctgctcattgatccatggcaccttcctttgtcccctgaagctgttccttgtcccctgttctcctgccaccatgccggagaaggagaccttccccagtatctgtccactgctctgctgcccgagacctcagactgaattcatcacaagtgcttctgccatgtcccaattgtgggtcctcctgtgcctctgggccctgtctctggcagatacccaagacagaagcgccgcttctctttcatttgtgactcttggagacaagcgagggccgtttccatatacaggaggcagaagccatgaccacgtgtacttaagtgatatctggccaagaattaatagcacattcagtgttcatacaaatcctgcatttttctctacttccaccgtctccctactgagctggtttactttggtaggctgtggagtgtccactgacatacacggggcatgtggccattcatcaataagaatgagttgattttctcctgcttccttcacctccgttgctgtccttgaagatattgctgttggtgccagacattagggctgtcgtcatggcttttacaccacagaagaccccatgaacatgcgtttctctttttcccgtgcttgcgagagtgttaggacaggatctgattctccactctgctcatttattccaggcactccggttaagtaactcggccatggggaagacaaccacaggccagatagttaacctgctgtccaacgacgtgaacaaattcgaccaagtacgttccatctctgtcagttcctgccccaattttccccctttttaatctgttggaatgtgagggttttggtgtagactaggattttttctgaagttgtgacataggcactttaaagccacatctcagttctgtgtgcagcataggtgtggtaagatgtgttgaccccatagagcccagttttgcttttctgatgttgcctgcagcacacatctacagtgagttggcggagagcaatattcctcccgacttggttagtgcagtgatagtctcgaggggctacctcctcatagtaatttttagcacatgacagaggagcagccagctgtctgtctgtctttctctttttctaaaggacccaagtattggagggcaggagtgtgcagtacagcccccctccatgtggtacctggttcataggaacagtttgatagggcatgtcgcatggtgctacctagctagaatttacggctctcgcccacacccgtttttatggtcggtcaccttacagattgatcactctagctttaggtcagatctgcccagcaaccattcccctttcagattttcattcatcagacatacacctcacctgcagagtgtggtaggcgccatagcataggcttttctggggagacccaggggagatgcagttcacttgtagagcagagggtgggttcgcttccacacacgaggaattaaagatcgggaccgtctctgggatggtgcagtctatccatcttataacagggaccacggtctactgttcatcgcacaagtgtagcatctgcagtgagacctacggttctgcctcagcagtgttaagcccgctcgctgagccccggttctctttgcattcttgtcttcccgtttggagcataatgttgctggcatgcgttcccacctgtcttgttttatttacagtcctaagcatgtgtgggctttgtatctgcaggtgacaatcttcttgcactttctgtgggcagggccgctgcaggccatcgcggtaaccgtcctcctctgggtggagataggaatctcctgcctggcgggcttggccgttctggttattcttctgcctctgcaaagctgcatcgggaagctgttctcgtcactgcggtaagagggacgctgggctgaagagatgtcctgtttggtaacaccagtcccctctccgcccctgcctgagactgctacccagaaacaaaatagaaacttcttatattttctgcatatgctgccggcccttcaggcttagctgggggtactccagccataagcggagggctggtcttggaaggggaagggggaaggtattggctggctgctctctgctggcttttcagtgtaaccacttagaaagcatccttgctgtaagttacgcatgtagatgttgttaaaatcaagtggtagtaaacacaattattttattttgtatattttattccgcccatcatccatccacccatccgtccgtccgtccgttgtgtgtctatggggacggtgcacatgtgccacagtgcatatatgaaggtcagaggacaattggcatctcagggtccgaatcccaacgttctatagattcatccacactgcgtgttatggagctgctcccgtatgcatatgtatgctgttttcactccagtatttccattgaattacaaactctcagggcgcagggccaaccttaacagaacctcgtggaagtctcaccatcctagcagggtgtgtgtcagaaacatggctgctaacacaagcctgaattgatcatgaagtgaccatggcccgaagcaggttccaggagtcgaagccagtctccgtagaggcctctggatgagggtggagatgccacaccgtttgaaggcatcaggctctttccttctgagcctgtgctctgtgtggtctcctctgtgttgaatgtcctctgccagttctaaagctcctgacatgctgtggctgtctgctgactcttttcccggcaggatgagcaagcctttctgctccacagcctttctgatcctgtctctttccacctctgccaactgtgtcctgtcagacgtaggtgatttcagtaccttgtgcccccctcaatataccagaatcatttttgggttttcttcagcagtcattcacaatgttccataatacgcagagttggcagaggtggctgactgttcattcggccttctatgtgtgtgctgcatgtaggacccacccatgctgcatgtaggacccacccatgctgtgggagcagaggaccgcctttgactctgggtccctgtctgtgcctgtgattgatacacaaaagttggctgccttccatgtggcttatctgtcacatctgtccccctcaggagtaaaactgcggctttcacggatgccaggatccggaccatgaatgaagtcataacaggcatgaggataataaagatgtatgcgtgggagaaatcgtttgctgacctcattgccaatctgagaaagtaagtcttggggtagactggactgtcttgtgcacttttctatttcctaattttaccgaatgaatttagagttctctttgatctccctggtaactcacctcagatatgatgtggtcacctgctgtggcagagtgttaagtataatgacctgggacatcccttttaacctgggcttctgtgtgccattattcccaggcaaaagctgcatttctcctcttcttgttcgtacctgtctgtctctgtctgtctcgatctcattctggttttgatggtgctggggactgaaccaagagattcacttgttctggacaagtatcacagcacacaccactgagccgcacgtccagccttcaggtgcactgccatagtcgaatggagttcaaaatgttcctgaatgcttcaccttccctataaataatgattccaagatgcaaaactctgagataattacattggtgaagctctacttgatgtcattgttcattgggaaggtggtatgaaccggttgccaccgtgtccagccagacttgatgcctgggtgtcactcactcgagattgttaggtgaaatgtttttctgtttgtcctaaacatttgagcttttttctttttcactctgtctggcacaggcacttaacctcttgtagccgtggatgtctgtgacctctgtatctgaagtgccctccatacgtagaaacctttcctgttctttgtctctggcttctaccaggcacaccactacccacctctgcactcttccccatgcctatgactccctgtgccagctctttctgtctagaattttgggggaaaataacgatttcaggggtacagttctctcctgagctccaggaggggagagctgtgtctcgcccacctttaggttacctgtgaggttcctaacctgtgaggacttcacctgtatgtatgctggttgaaggcatttgtatgggccctcgataaaatcagctcagagtggcccacagaataaccctgcggctctaccgtcatttggctgaatgagaaaagtggtttcttggtgtcctgtgtggttactgaagctgtccccctggtatgtgctagcaactgttgctgtaatatcacagaccatttaaaaattgcttatcatgtgtgtgcatgtttacatgtatgtaggaatgtgtgcacgtgggaatcacctgctcacgtgcagaggcacaacctcaggaggcacccgccttaattttttgagacaggcgttctcactgggaactggggtcgaacgattcagctaggctggtagccactgagctgagggacatacctgcctctgtcttctcagtgctagaagtgcaggctcacattactttgagtagattttatcaagaagatgaacacaaatgcattctgttagcatcagtccccggcctcgtctctctgagtggtagattccttcctgcccaaaaggagtcccactcagctcaggcctctactctgcctagttgtccagtgagtctcgaacagtaattctcaatctatggatcaagacccctgtgggtcacctaagaccatctgtgacccacaggggactaagacacagtcttctctgtgagcccagcaacttgctggagaagagaagagcaaccctaaaactatagaatctcccccaagatcttaggcagaaacatctggcacagagcatcctagggcatggagaagcgtagactcgtgcatatagctggtctttatgtggatgctatgatgaaactaagggcttcatgcttgcccggaaacactttgcaggccgagccatctcttctgtccccacaggcagttaaccttgatgtgtgtgtactgcctaacagggtcctcattcatatgacatcgatgttgaattttctgtgtggggaaaaaaaaatctgtttttctctcttccaggaaggagatttccaagattctgggcagctcctacctcagagggatgaacatggcgtcgtttttcatcgcaaacaaagtcatcctgttcgtgaccttcactagctacgtgctgcttggcaatgagattacagctagccacgtgtttgtggccatgactctgtacggtgccgttcggttgacagtcaccctcttcttcccgtcagccattgagagagggtcagaggccatcgtcagcattcggaggatcaaggtttgtgtacagtacaatcttaaagttggagatgtcttttgagtcagatggtactttccctgctgactgtcactgtgtctccgaactgttagtcaatctcaagtggtgtgtacatgtcgtagtcttaggtacagtacgctaaaagtccagaagaatttctgatctgtcatgggcacaatataaataccaacagccagcatcagggtcttaatatataatggtgattggcaacttttatcttctagaccactggttctcacccttcctattgctatgaccctttaatacagctcctcatgttgtggggaccccccaaccgtaagatttattttcattgctacttcataattttgctgttatgatttgtaatgtaaatatctgatatgcagatggtcttaagcgacccaaagggtctcagcccatagactgggaactgctgctttcgactacaggacaactaggcagggactgagtacaggcctgagtgagtgacattcctgttggactggaagggctcttagagagaggatggactgtaccaatcaaacccttgtttaaaaatggatctgtccatctcagctgttttgctagttcccctctggctctgtctttccctccagtctgcttttcactttctttctcttctaagagccttttttttttttttctagcaggcattttccttggctagtctgttgatttccaccacatttacccaagtagccactcctatgaccctgaactgctaagggcagatcattcatagagccttgatgctggtctggtgcataaggaatgctaagtgctggtgtgtcgacgaatgtgtctggaggagctggttggtgcggtaacaggcctgggcacaaaccgtgttttatttctggttctcagtgttgttcattgtccaataccagatttccatcaaaccttagggggaatgaatgtagaggagggggaagggcttgccataaaagccaggaggggtttttttttttccttcctgaaattttgatttttttttcttcccaaagtatcatgtggagttcttaggtctaaattgtgcctctatatcagtcccccaaagctctagggacattgaaaggactacgtagagggtggggagatgtgtaacatctgagaagcttggtgtatgtagctgttgtgctcagactcactgcagatgcgcatctgagcacaagaactgggaaaggttgagcctgtgcacctttcattatggatgaaagggaaggaagagggaaggacccaggaggccacggaagtggcagggggcttgctgagaaggtgggttctaggcggaggggagtgagggagcgggaaaatgactgaaattcattataacaataagaggaactgtcacacattatacacagttactacctatagaatagatgtaggatacctatagaatagatcagtcatgtagggttagttctggacctatagaatagatgtagaatacctatagaatagatcagtcatgtagggttagttctggaccagacctgagtttatcattccttctggcaatggttgaatagcattgttgaggggtgacacagggcatttaattatttctttttttctttctttttttttttttaactttcaaatctgaggctatatgttgaccgtaccatcattctaaatgtataatataaaactttcccttctgtgcctttacacggtgttattctgttgtaattctactgttgctgccactgcttcccctagacttgagagctactctgtggggatcaggagccaggctgtttcctaatcctctgcacgtagcagcagttgaatatcagcacccaccactgtctctgctgtacagagagattgtgccttttgtagggtgacagtgcccctctcatagggtgacagtgctccacacataggttgtatgtgacagagcgaggacctctctgagagcttcggcttctaaaccagtgtcgtatcggccacactgcttagtaactctgagggtgcaggatgtacacctgcgtagctcagccttttaagaagtttctctgcttcctgtagatgcagacatttgagggctgggtttgcagctctcccggtcagcttctacgctctctcagctcccgctgtataagaccagtgccacacagcccactgtcacgggctacataatggatgcccggtcagcgctgttggtaggagtttcagttacaggatgtgcgtggtgtgtcaacatggtggagtggcgtttgaatgaagttgctcagggagccgtgatacgtggttcagcggtgttgaggaatatggtagaaggggatagacaggccagcacaaacatcacttcaacgaaatgaagagtgctcagcgggcttctgaaactgtgttccttcaaaaggagaggtaaactgaggcaggagagggaagagctgacatctggtagaccatgagagatgcggtgggaagctgctctggttagtcttagggtcgcatgtgtctgtctgtctgcctgtttgctggacatgggctcatgtaggcaatcctagtcgtagctcatgtgtggctggcctgtgggaatgaagacaacagatcacatcttaggctactggggtcttggagagaggtttgtaggaagaagttttcatacacagggaaacaaaacaaaatagttctgtttttttttcccaaggatttaacaaacaagtgttaaggttggaatataaggtgttccgttccaaaagacacacctgtttaaggcttggtccccaatgagagggaccagactagtgattgattggatcaggagggcttgacctaatcaatggattaggccattgatggactccatgatttgatggcacagctgagaggtggtgggaattttctagcgtgagcccagcgggaggaagtgggatgcttggggagctgttcttggaggctgcgtctggatctttattttcaggatgctgtggggttagctgcctccccatcccttgttcctgatggcgtggtattttcgccagtcctctggcactgtaagtctagttgttttctcagccatgaaaagtgaccggccgcagagtgtcgtgtccaggtttgtagctttgtggacttatagattagaatgctgaggacttaaaggattttttaagcttcaggaaatgatatggtgctgtttctttccaggtatgctcagataccctctttagttgcctgctctgttagtggtgtgcgtggctaaagaacacccacagtacagcccgatagtctcaccgacagtgcattgatctcatgcaagctatttgtgaggtttcttgtacaaattgacgtctgaagcaaaagatccctgctgggtcacagttgtggaagctgcaggtgacagcagagccatgctccttcagaagccactgggggacagcctttcctctcctgacctagcatccaaggggacctgggtaccattccagtctgtgtcgccaaggccacacagtcgttttgtacccgtgggtttgactttctaatctcatgcaaagaagccagctgtgttggatttagggcccacgtgtggccttgtctttgctgtatctgaaatgatccggtttccaaataaacacacatttcaaggttccgggggcagaaggacctcaaggtgtgtttctgaagaaggggtaccttaatctgtttgtgctcccataacaaaactccacagtttgtgaagagtacaaatttgtttttcatagctctggatgccaggaggtacaaggccaggtagggttcaggcaggcttggctgtcggctttctgcttccaggatggtgcccccctgtcttatgctctggagggtagggcatcgtgtcctcatacagtagaagaccgagagagccgggtgctgtgcgatgcctcccttgtaggaggtttggccccattcacagtgcagagcctgtagtgtagtttaatcgcctctttaaaaaactacctcttaaattttgtttttccctactagggctcaaaacccaggctgttgcttaggctatgtaagtgaagtaatactcaggtacaggctcagctcaaagacctacatcatttcccatcattattagcagctattaatttttataaaacaatgggcgtcattgtgatatttcatatatatgtgtgtgtgtgtgtgtgtgtgtgtgtgtgtgtatttatatatatttcactttgatcatcttcagttttctcttactcctgttccttgcttgctctacctcctggtactttcaggtgctatctgtattgttctggtaatattgtttggttattttcctttttgttaatctttaatctttcttttggtttgttcccttagaatgagatttgcatgttccatatttgtgtgtgtgagatgtgtatgtatgtgtggggtgtatgcatgtatgtgtctgtgtgttgtgtgtgcatgtgtgtgtagtgtgtatgtgtgtgtttgtgtgtggtgtttgtgtgtatgtggtgtgtgtggtgtgtatgcgtgcacatgtgtgtagtgtcagttgcacatatgtgtgtgtgtgtatatgatgtgtgtgtatgtgtatgtgtggtgtatgcctgtgtagtgtgtatgcacgcatgtggtatgtctatgtttggtatgtatgcaagtgtgtgtgcgcttgtatgtgtgtgtgtgaaatcgaggctccatatgtgaacaaagacatgacatttgtctttctgagtttaattttcttggtaggaacatgtctggctccacctgtgttcctgcaaatgacagttttgttcttttttatggccaaataaaactgcattgtttatggcacgttttcgttcaacacttgtctcctgatggatcccactctaactacataacgcctcagctgttgcggcctgtgctgtgataagtagatatgcacctggggttccagtgaggcctagacaccctcagaagcatcccagcagtgacaagcctggaccccagggttgttttatttttagttttctttctcaggagcctccttagtgtaactttgcattaccctcagcagggtttaaggaacccttcgctagccttgctaatgtttcttgtcatatgttttttttttagtgatgttccgactgagttgtgatttccctgatagttaagaatgttgaatggttcttagatatatattgctcatttgtactttgtcttttttaaaaagttcttttaatattgtacatacaggtatttgcccgtgtgtctgtaccatgtccctgcctggtgcccatggatgtaaggagagggtattgcgtcctctgtcactgaagttaccgatggctgtgagccactcgctgggaatcgaatccagctcctgtaggagagaagccaatgctcttaacccataggctggttttatttgtcaagttgacacaaactggggtcatttgggaagagggaacctcaacttaggaaatacctccattgattagcctgggggaagtcctcttgattaataagggacatgggagagccaactcactgtgggaagtgtcaccctagacaagtggcccaggttctacaagagagtcggctgtgaagagcaagccagtaagcagcctcctccatggcctctgcctcagttcctgcctccacattcctgccttgtgccaggagactcccagcctggagagggtagtgacaggggacacagagtagggctctggtgtggctttgaaatctgagggtctccggaatttctagctctctaactgtactgaaatgctgatgataacttctaaaaattcctaaaaactttcttgttctttttgagggtaagaagctgctggcttaggtgattgacacctgtagcctgacagaggcggggccaagcaatgtggcctttgttctatctcagcaggaatctcgaagctctatcagcaggctagtaggaagtcacaggaagaaaaagagactctgaaaagtgattatagtgtttgctatgttactaaaatgtttcctatgaaagatatctaagggggaaagcagaaagatcctaagtggggaaagggaaaaatccttcctagctttttgtctaagacgtgttctgtcccaaaaagttctcctcagctcagttcctctcagctcagttcctctctttgtcctcagcactgaaaacatctttcagaatacatgatcacgtgttgaaaagttcatcgcaggttcacacataaaatcaaatcataaactgaaatagttagtagtttacaacagagaatgtttacacacatatccattaggagtaattatctggctaaacatccatcacctgtcacagatccacaggttcacaggaggtttaaaaccataactaagttattagtgaagttttgtataaatgaacccagtcaatattttatattctgtcctagcacctataataaatcattagtttgctttttatgacctttggttagttgttttacaacgtcttggaatgtgctcagagtagaagaaagtctggttaccatctaggaaaaattaactggtgacacatgggagactggcagagttctcattgcaacgttgactatcagaaaaggacctaatagtagtcccactataaaagagcttaataatcactcatataattttaggaattcttatagtattgtcataaagacttaagaagtcatctatctgtctatgtagcattatcacaagacagtacttctttgctcaaaagaggtgggctaatgccgagtgattgttatatatgtttaataataacaggaaaagcatattagtagcgggggtctttcctaaaatgaattctcctgggccttgcctatcagagcgaatcggtcactgattataatccaaagcagaccatctcaggaagatcacctgctggtcattagcttgtcctataatggcttctgacagccttgagttcctgacctgacttcccccagtaatggagtgtcacctgagagttgtcaggcgacatcaaccctctcctctccaagttgcttttggccatgatgttgatcacagccatagaaagcagacagggacgagcactgagctgtttttccagccctgtggatggcatcttttgagaactgcttgctgctctctccttaggatgctttgagccttgggcatttagcttatttgaatcctttatgcattgtagatattattccctgtcagatgccgggctggcaagctctttctcccatccttcagttgtcttttatggccgtagtttcctttgctatgccgaaaccttttaattctatttgccagttctcatcattaatgttcccagagtcctttgcagaagtccttgtccatgcttgcaatttgaagtgctttctgtttgctctagcagcttcagagtcacagttctggccttgaggtctttgatcaatttcgaatagatttccactgtagtttttttttctgagtgagttatgcctggcatttgaggaacaggagggccccttcttgctgtcattagattctaagcgttagcaggacttcgtgttgctgcttagactgcaccgaccagctcctgactgggtggaatgcagcagttagggaagatgctttcgaaatgtatttgagagtggtgactttgaggctaccccatggcaactcgtgacacgctggttggttaaaggggagacgggcagtggctgagctgtggcagtacgtggcatggcgtgacaggaagatgggcagagttgacctttcccccctctctgctgcgggtctcaggccctgccacctttgtagcctgacaacattcatcctaggagcagccttggctttcttctggctttagcatggtgtttggcatatgataagcacccagtaaatatttatcaaggcatttccttccatcttccatgtgtttactattaaaatacaacaaaacaaaatcaaaacaataccaaggtccagttctatgtgcaatgtccagttctacatgcattcagtttcttatcaatgttttcattttatagaggaactggtgtatgtgttgagaacgttgcaaggactttgctcaggttcgaaacttggtgtgcatgaaatcgtgtgtatagtatgcagtctgttaatacatagcatgttctgatacgatttcacattttacttttaaggtatttttattacagttttatttactgtgtgtgaggggacacacgatgtccaggcatgtatgtggaggtcagagtataactggtgagagtctccctgttcaccctctgcatcctaggactgagttagattggcagcctttgtggcagaccctctcactgactgctgaggcagcccctagctccatgtgttgacactttaaatagagttggatagataatccttaggctgtaagacgcttacctcagacgttccatggagacaccggtttctgttttatttctgtagttaaaacagcccgtgctttccttttctctagaactttctgttactcgatgaactaccacagcgcaaagcccatgtaccatctgatggcaaagccattgtccacgtgcaagatttcaccgctttctgggacaaggtaacctcccgtgatttctgagacaccgtgggtgacactgatgaagcagagaattctgagagttttacgtagtctgtaaggggcagtcagttcatctattgaagttttctgtaaaatttcttaaaatccccaaacttgaaagttgtttttaaaaaatattttattttatgtgtatgtgtgtgggtctgagtacatatttgtgtggagttgcccgtggcggtcagaaaagggcatcagagcctctggagctgggcttccagggggttccaagccaccatgggggtgctgggagccaaacccaagttctctggaagagcagacagtgctcctaactgctgagccgtttctccagctcctggaggttgttgtctatcacggaaactttgatcattgccttggtttgagctgaaagtgttgacaccagcagtgttagaatgcatggggtcagtatgggatcagttaactgtgcatattctataggctaactgcacattctataggttaactgcatattctataggctaactgcacattctataggttaactgcatattctataggctaactgcacattctataggttaactgcatattctataggctaactgcacattctataggttaactgcatattctataggctaactgcacgttctataggttaactgcatatattttataggttaaccaggtgcattctatagattaactgcacattctataggttaactgcgtacttctataggttaatactatacattctgtgggttaaccgaatgcattctataggtcaattgtgcacattctataggttaacttcatgtattctaaactatcctagatttttgaatcttgttttaacatcatcttgtagcacttgaagaacagtctgcaatttgcatttttgtctggtatcaagtctgggaactcgacctcttagatgagtgcacagaccacagcatctcagcatcgctctccacagttaccattggttgagtgtgttaggctgttgatgtgttggtgttagatttagacgaaagctcttactgtttggtgatcgacactctgaaggtccgtgcttcagatgtcagccacctttctctctcccgatacctctcgcttcttctgaatcctggccaagctggtgtgccagttagaaaggcagcctcactctggtcctggtctgagctactccattaagacccccatagcacacgcttctcaattggttttgcaacgtgtgggagttctatagagatgtgaatttgatttggcgtcttgaaatttaacggagaaactatgaagcacctaaaaaatgaccaatggttaagtttcttgaaatctaccttatgtgacgtgtttgaatcaaatgttccagaattttggtatttccatgtccatcatgagaaaccttgatgatgagatctgagaataatcatggaaaccgtgtgtgcctcctatctgtcttatacacatggccttaatatgatttatcagtgagttcacagatggagtctcacacttgggctgccaatatattccactggaaagaactcagtgttcagtttttgaatttggaatacttcaataaaacatgcatagagccttaccttttgttaaaatgtgtcgattgctcgtggatgtggtttctgatagatcccgtcctccttccccacccgctgctgtgttgaagcctgtacctccaccgtgtttatggtagctgggccgtgttgtccctgttcggcatggtgtcagtaaggcacatcacatgacttggacctactaacctaccctgggtttaatggcttaagttttgctgttaaactcgagccatattgaccatattgtgggacttactttccgtgattgatttcatgacatcagatgcagtcccgtgtccctgagtgcattgctggaaggactcattggcaagccacagttagggatggtaccaaactgctcatcacggctgggcatgccacattcttctactgccacctcgtgggagctgatgacatagaagattaaaacctaaggcccctgtgaaaatttaggaatgattaaaatcctcctgtgtgtgttgttctatgtaaaatacttgttttagtgcattaagtatgaaccaagagtctctcagctcccacattgtccttctaccacttaaattctgtattcacatggaaatctggactcatttctttaaataggttgagtttatctaaataaaaagcttgaaaaggctgtcaagatgtgacagccaaagtgaggaggaaataggggctgtgcgtgtgtgtctgcagccgtggttttatgtcttctactgcttaaagtgatggtgctagttctttaaaatgagactttttttttttttttgtaaactttacctcataggcactagacagtccaaccctgcaaggtctttcctttattgccagacctggtgagttgttagccgtggttggcccagttggagcaggcaaggtaagttttttgttttgtcttgtctttgggttggctcactgggagttacttatgtgaccacgagtcaggatggaaggactaggggagtgggctacttctttttgtcagtgtgcctgtggctgtctggctttcaacagttcttaggacatacccaagtcatgtcagtacatatttagctcaagcacatccatggtttatgctatggttggaccaaaagatgcacagagaagcccaggcccaggcagctctgggttctgggcaaggcagacagatggtcttaaggctgtgtctcaagttctctgatcatggtaggcatacacttgttaaactggtataggattccatctttgtatgagaaggcttattcctcagaattcatttaagtaaatatcttctgagtgcatcggatgcatactcggtgcatggcctttctggggtcagcacataaaacagaggagatctggattatcaggatgcggccgcagcttcgctcagtattggatggctgaaacctctatggtgctggggctgtattactgccaatggtttttgtttgtttgtttgtttattaattgataactgattaatgattgattgattgaggctggatctcaaaatacgcacaatggcctcaaacttgtatccaaggaaaattttgattgtcttgcctctgtgtccctcgtgctgagcttataggcatgcaccagtgtgaccagcagaaaccattagttatacgacatagttcatgtagtattctcaatggcatatagccagcattgccattaggagcaaggccatttgggagggcaggctgtcacaacctatttctgtaagctttgtttgtttgtttgttagtaaacatcactttactgtggccagtggtgctgtttctgttttgctttcttgttttagctgcagcgtctagtgaccttttatatgagaagctgatgcttgtcaaaccgctgggctgggcagagcccggaacttggtttaattctgtgcctacatgaacagccttatgtgtgttgtgaactctgtttcagtcgtcgctgttgagcgcagtgctgggtgagctgcctcctgccagcgggctggtcagcgtgcacgggaggatcgcctacgtttctcagcagccctgggtgttctcgggcaccgtgaggagcaatattttatttgggaagaaatatgagaaggagcgatatgagaaagtgatcaaggcctgtgctctgaagaaggtgatgactcttgttgggtttcctatactccgtgtaaacgcccgccttcggggcgttctctaagtcatgatactccggctaagcttttggaagcctgcccatccccacccatcactggctgctttggttttgttaggttctgttcagttttcaccatccgtatgcgctgattatcacaatcgtggggagcaccatccttaactttaaaaaaagatgtatttatttttatctcacgtgtatggtgtttcgcctgcatgcatgcctatgtacatctggtgctgacagagaggtcaggagagggtgggggatcccttccaacagaagtcacggatgcttgtgagccactatgtgggtgctggaagtccaacctggctcctagcatccagtgctcctaaccagtgacccacctctttccagtgcctgagctctaacctttataaagcattaaagagttgcagaggttagtgtattgagtccttctgtccccggcacacagctttggcaacagccaggtggtgacgagtctttagtccttaccagctgaacttttgaagccccacccacccccattctaaattatttttccaagcaattttggaccctttgtatttcatctgtgaactttttcattatttgtgtttaaaagaactgtcttggggtggcagagggtggaggttttgggaggtatggctgccacaaccgtatcatccataaggaaatgacaaaattgcttgaggcaatccacagtccagccagtctgttgtgctgggttctaattgttaattcgcacaactttgaggagaggctacagctagggcccagcttttgcttttccctttcctcccttcctcccttcctccnnnnnnnnnnnnnnnnnnnnnnnnnnnnnnnnnnnnnnnnnnnnnnnnnnnnnnnnnnnnnnnnnnnnnnnnnnnnnnnnnnnnnnnnnnnnnnnnnnnnnnnnnnnnnnnnnnnnnnnnnnnnnnnnnnnnnnnnnnnnnnnnnnnnnnnnnnnnnnnnnnnnnnnnnnnnnnnnnnnnnnnnnnnnnnnnnnnnnnnnnnnnnnnnnnnnnnnnnnnnnnnnnnnnnnnnnnnnnnnnnnnnnnnnnnnnnnnnnnnnnnnnnnnnnnnnnnnnnnnnnnnnnnnnnnnnnnnnnnnnnnnnnnnnnnnnnnnnnnnnnnnnnnnnnnnnnnnnnnnnnnnnnnnnnnnnnnnnnnnnnnnnnnnnnnnnnnnnnnnnnnnnnnnnnnnnnnnnnnnnnnnnnnnnnnnnnnnnnnnnnnnnnnnnnnnnnnnnnnnnnnnnnnnnnnnnnnnnnnnnnnnnnnnnnnnnnnnnnnnnnnnnnnnnnnnnnnnnnnnnnnnnnnnnnnnnnnnnnnnnnnnnnnnnnnnnnnnnnnnnnnnnnnnnnnnnnnnnnnnnnnnnnnnnnnnnnnnnnnnnnnnnnnnnnnnnnnnnnnnnnnnnnnnnnnnnnnnnnnnnnnnnnnnnnnnnnnnnnnnnnnnnnnnnnnnnnnnnnnnnnnnnnnnnnnnnnnnnnnnnnnnnnnnnnnnnnnnnnnnnnnnnnnnnnnnnnnnnnnnnnnnnnnnnnnnnnnnnnnnnnnnnnnnnnnnnnnnnnnnnnnnnnnnnnnnnnnnnnnnnnnnnnnnnnnnnnnnnnnnnnnnnnnnnnnnnnnnnnnnnnnnnnnnnnnnnnnnnnnnnnnnnnnnnnnnnnnnnnnnnnnnnnnnnnnnnnnnnnnnnnnnnnnnnnnnnnnnnnnnnnnnnnnnnnnnnnnnnnnnnnnnnnnnnnnnnnnnnnnnnnnnnnnnnnnnnnnnnnnnnnnnnnnnnnnnnnnnnnnnnnnnnnnnnnnnnnnnnnnnnnnnnnnnnnnnnnnnnnnnnnnnnnnnnnnnnnnnnnnnnnnnnnnnnnnnnnnnnnnnnnnnnnnnnnnnnnnnnnnnnnnnnnnnnnnnnnnnnnnnnnnnnnnnnnnnnnnnnnnnnnnnnnnnnnnnnnnnnnnnnnnnnnnnnngcgtgttgatttggatatcttccttcctagattcccaaatgaacattcagttttctttccttcatgtcttggcttgcatgtcacggtgtctttattctacctgctcgtgtaggctttgtctacccctctaccgtgcttgtgaatgtgtggttcatgtgggaggctgagtcagaggttggtggggcggctgtgaaggcgcacattccctggtgagctacatttgctcccgtcgctcttgtgtctgctccttagcggaggcattcagacttgcctgctttggagcagtgtgcatctccgtttggccatcactgggcatctgatttatcccccaggtctgtatcctccaccctccccattcagtcgtttatgatctgtttctacttctatgcccaaagcaccatggtcctctgtaagcgagtcctgacagtggaggctctggaactcgtctagcgcgtgattccttctgtccatgttccctgtagcacagggccctaagcactcacagtgctcaggctgttgtaacagttcctcaggtgggccctgcttgcccctgtgagtgattccctgcatggcatgagccagatcatgtcatcccttgaatgtcataccagtgaagctggggtctgtctctcttcatcaccctcgtctcttagcgctgctccaactccatggcctcaaggttgctgtcctttgaacacagcagatatacaccagctcacaggaactataaattattcctccctgtgtatgatgccatctgttttgcccaggtttcactagccctctccactctaggctctcttggtctgagcagtggctgaccattcagtgaagtggatgtccccccaccccctaccctcccattctcccaccccctaccccacgacccccccatgttctcannnnnnnnnnnnnnnnnnnnnnnnnnnnnnnnnnnnnnnnnnnnnnnnnnnnnnnnnnnnnnnnnnnnnnnnnnnnnnnnnnnnnnnnnnnnnnnnnnnnnnnnnnnnnnnnnnnnnnnnnnnnnnnnnnnnnnnnnnnnnnnnnnnnnnnnnnnnnnnnnnnnnnnnnnnnnnnnnnnnnnnnnnnnnnnnnnnnnnnnnnnnnnnnnnnnnnnnnnnnnnnnnnnnnnnnnnnnnnnnnnnnnnnnnnnnnnnnnnnnnnnnnnnnnnnnnnnnnnnnnnnnnnnnnnnnnnnnnnnnnnnnnnnnnnnnnnnnnnnnnnnnnnnnnnnnnnnnnnnnnnnnnnnnnnnnnnnnnnnnnnnnnnnnnnnnnnnnnnnnnnnnnnnnnnnnnnnnnnnnnnnnnnnnnnnnnnaaaagtgtagcaatgcaatgccctgagtgctttgtcgttgattaaagtgggcgtgcctgctcttccgccctgcaccgcctgcctctgacgtaaagctgccgggcaggactgaggcagagaaacgctgagtctttcctcgtctctcttcacgcaggacctgcagcttctggaggacggggatctgacggttataggagaccggggagccacgctgagtggaggccagaaagctcgggtgaacctggcacggtaacttgctttccgcagccattgtgcatgtgccttgatgaggcttcaggaacgaggcctgcgttgtctgctcagcacctcagtaccgtgtgccgcggatacttcaaatgaacacccagttgccatgagcctggatccctctggccgtgaccaatgaggtgctctccggtctgatttctctctgtgcctttcagggccgtctaccaggacgccgacatctacctccttgatgatccgctcagcgctgtcgatgcagaagtgggcaagcacctgttccaactgtgagtttgttctgtcttacgtcagctctgtgttcgggagccctttcagtggccccgtgagggatttgtaatttctacaacttctctctcctctgttcctctccagatgacccattttacagatgcaaggtcaaggttgaaaaatagagcaggtgccgccagtgcagggacgtgcacagagcccgagtgttagagtttaagaacagaaggcacgtcctctggttccttgaagttcatagtcaagagactgggcgacctgggccccaggcagaaggaagatgtgcagggttagaaggaaggagggggcacggcagcttggtagtggggagtcagcacattttctccgtagtttaaaaataggatttacttgatttcaatgtgtgtctggtgagtgaatgccacatgtgtgaaggtaccggaggaggccagagagggcgctggattccctcgcagctggcgttccaaagggttatgagccacccgacacaggtgctgggacctgaactgtgctcctccacaagtgctttcaactggccatctctgcagctccaccttttacttggcgtgtgagggtgggccctctccagcccctccttcacaatctttaacttggcatgtgaagatgggtttcggtggcagttagcataggacctccatggacagggccttagtagtttacggtcatcggttggctgggccatgtggggacagggactaggggatttcactccttctggtagaaggagcagcagacacagaagtataaaggcacggacaagcaaggcactagaaatcagccaccaaacccagacactattgcgtatgccagcaagattttgctgaaaggaccctgatatagctgtctcgtgtgagactatgccagtgcctggcaaatatagaagtataaaatggaacacagggcccccaatggaaaagctagagaaagcaccaaaggagctgaaggggtctgcaaccctataggtggaacaacaatatgaactaaccagtacctcccggagctcgtgtctctagctgcatatgtagcagaagatggtctagtcggccatcagtggaaagagaggccccttggtcctgcaaactttatatgactcagtacaggggaacgccagggccaagaagtgggagtgggtgggtaggggagcagggcgggggagggtatgggggcctttcgggatatcatttgaaatgtaaataaagaaaatatctaattaaaaaaaaaggcaaaaaagaaaagagcagcaagcacagcgttcccctgtgaggagatgcacatcacacgtgattaagagccccagtgccaacctgcaggtcctggggtctttagctccatgtgacaaaataaaaggcaacagccggtgtggctcacaccgcagagcttccatccctaagagccagggagggtggaagtctgaggtgagaggacactgctggcccagcacatctgtacattttccttcttgggcatctttcctcagatctcctcttcacaggccaccagtcaggtcgattgagaaggcaccccagagcctcccttaccattctctctaaaggctctgtctgtcagtcattaggtgttgcactttagtacatggatttgagggatggcgttcagttcagaacagatttcaggcagagtcaagataacaggtgcccaggctctggactcgaggactggcacccaaggtcatccactgagcggggccttctgaggcttggtgttcagaggagagcgactgcttccgtaccaacacgggatccacgcatgccgcctgatgttgtggtgatgaaaatatcctggaagtggtgatcgtggtggctggaccgcagtgtgactacacttcacgctgtcgtgagacacctaaaatggttaaagtagcgacttttatggcgtgtatatttcaccacagtaaaaataaaaatgaatgcccggtagtgttgagtctttcagaatgcagcaagtgagagcagctggtggttggctttaatgaagctctctcatccgaccctctttttctgacttgatggattctgggcagaatcagccctttgtcccttgggtgagccttgagtggatccattcaagttccccatcacttggagactaattctcgctgggatgctgtaccagagtctctagggaggagagaggaacgcattttaattgctgtgtatcagtatgcagatcacaagggtgctcccaagttcccttttgaacagtgttcataaggtctcctaaaacctttaatgttttaatggctttggatagacacttggtagaagcaagcttgttaaaattggtgcttgctaatcagaaccacgttctttggggggaaacttggagcggggagcacagatgcaatttaggaaatcactcagcggcagctggagaatgttctcaacgagttagaaaattggatcgaacaatatgctatgaaagatggcggccgtgtcgaggcttagaaatgtgaagtgtgtttgtgttaaacgcgaatgagtcactcttctgtttgccattaacattttactccaatcacgaatatacgtccaaggttattacggttttcaagttttacaactatatgttgcaaacagaggaagtgggaggctggggactctcgactgatgccagtctgatgtagctgtggatcctgcattggggaaagtctcagaattatagatggctgcctcttccatgatcttctcagggttttcgcagttagatctcccacactaccaatccctccttcatccttgtagtttataggagctactatgacaaaacgccgcaactgggtgcttataaacaacatgtatttctcacggcctgagatgaagtgctagcagatttgttgttcatagctggatgtcttcttgttttgccctaacgacagctgtggtccacgctttggtttaggaacagcactgaccctgtccatggtggcagattcccatgaaggccccagtgcctcacaccatcacactggtgattaggcttcagcgtatgaacacatacatggacaagggcttcagcatccagcagtggcttaccttccctgcttcagtctttcgtacactctcaccatcaggatgtggttgctcatcatgccagaatgggggacattgttctttgcagtctgccccactgctggtgcctctgtaacccagcactccagcattccacatatgatggcatgttgaatgaggtcgctccttctcagcctgatgactgtgcctcgggaggaaggcgagtagcctgcgtgcctgactttctctcctgcacctccaagaagcattatggctttctaggattgtgtctggcagatgctcatagcccattaaccatagcactcagtgtgggtttttgcactgccttggccttcctgcccacacaggactgagtacatgagagcattccagagccacaacacccgccagggccatagcatctgccagggccacggaaccccctgtatcaccatggttccttccttgcagaggggcctccttctcccacattttctaaaatagcgattcctaccttgtactcacatcatgacatcatgacaccacaacgcgttttcttctgcctcaaacacacacacacacacacacacagattctttaccactcacacacacatgcatgcacacttagaaattttactttttaaaatttaaaagacattctgggaaaaaaaaacccgcctaacttagggaaagtataaaaccactagttagaaaattattctaaggatttccattgtcttggctgtgattggatttgttaggaagaaagcatctccaaccattggcttgggccttgcatgtgtcagagcccacagggctgagggttaacgcctccatggcagtcacatgaagggatgaaggcgggtggccctgagtgagggcacagctcagctgaagccttgagagctgcatccaaggaaggtttatcaggtcgagagatgtaggtgagaactaagccacatcacggcatgctgaaagaggaaaacttaatccttcatagagtgcatgaagggatacatagattatacatggatttgggagtcttggttctgctaacggctgagttctagaaaaaccttcagttttttataaagacttccggtctccaagtggaagcaaagatggttagaagcctagagaaggatacagggcagagctgatagggtttgaacactggtgattgtgttgtaggcctttccccgtgtctgtccctttgtttctcagataagtagtcttaacatctttgttatttataatttttcatattttaaaaattaaactgtaattatgtcatttcccctttttcctttcttccctccaactcctcccatgcgcctggagcccctgctccctcttagaatcatggcttccttttctttagctcttattatcacacatacacacacacatacacacagacacagacacacacagacacacacactcacacagacacacgcgcgcacacacacacgactcacacacacacagacacacacagacacagacacacacacatccttaaatacataaatacaacccagtcagtctacatgatgctccacaagtggttgtggcactcatggctccacaagaggccgggcagcctccgttgacatgtctataacacaactcctgcacctaaaaagctcatgggaacatcactgggaagtgggaggaaacattgccggagccggaaggaacaggaagttcctgtgagatcctgtctcctaaacatgtcagaagctgcacccattaatcctnnnnnnnnnnnnnnnnnnnntggcctgcgtgcctgactttctctcctgcacctccaagaagcgttatggctttctaggattgtgtctggcagatgctcatagcccattaaccatagcactcagtgtgggtttctgcactgccttggccttcctgcccacacaggactgagtacatgagagcattccagagccacaacacccgccagggccatagcacctgccagggccacggaaccccctgtatcaccatggttccttccttgcagaggggcctccttctcccacattttctaaaatagcgattcctaccttgcttcttcttgtactcacatcatgacaccacaacgagttttcttctgcctcaaaaacacacagacactttaccactcccacacacatgcatgtgcacttagaaattttactttttaaaatttaaaagacattctgggaaaaaaaacccacctaacttagggaaagtataaaaccactagttagaaaattattctaaggatttccattgtcttggctgtgattggattttttggaagaaagcatctccaacccatggcttgggccttgcatgcgtcagagcccgcagggctgagggttaacgcctccatggcagtcacatgaagggatgaaggtgggtggccctgagtgagggcacagctcagctgaagccttgagagctgcatccaaggaaggtttatcaggtcgagagatgtaggtgagaactaagccacatcacggcacgctgaaagaggaaaacttaatccttcatagagtgcatgaagggatacatagattatacatggattttggagtcttggttctgctgacagccgagttctagaaaaaccttcagtcttttataaagacttccagtctccaagtggaagcaaagatggttagaagcctagagaaggatacagggcggagctgatagggtttgaacactggtgattgtgttctagacctttccccgtgtctgtccctttgtttctcagataagtagccttaacatctttgttatttataatttttcatattttaaaaattaaactgtaattatgtcatttcccctctttcctttcttccctccaactcctcccatgcgcctggagcccctgctccctcttagaatcatggcttccttttctttagctcttattatcacacatacacacacacatacacacagacacagacacacacagacacacacactcacacagacacacgcgcgcacacacacacacacgactcacacacacacagacacacacagacacacacacacagacacacatacacacacagacacacacgcgcgcacacacacacatacacacagacacacgcacacacagacacagacacacacacacccttaaatacataaatacaacccagtcagtctacatgatgctccacaagtggttgtggcactcatggctccacaagaggccgggcagcctccgttgacatgtctataacacaactcctgcacctaaaaagctcatggaacatcactgggaagtgggaggaaacattgccggagccggaaggaacaggaagttcctgtgagatcctgtctcctagacatgtcagaagctgcacccattaatcctcaccagcaaggccgcctaaaggaaacctgaacgaggacgacagcaataggcatgcgaaggagaagaagctcaagagatctcaactgtagacaaagaactccaagcagctagtccataatgctgagagcctgagaaatagccttccccagggaagagcacagcagttggttatccaaccccgaatggtcagccctgagagtgtacatatacaagtgacattacacagactgaccgggctgtatttgtctatttgtgtgtgtatccaaggtctgtgacgtcacgatgacgtcactagctctgggtagttaactaggttcccagtgataagcatcctttcccttccgttgagagctccccaagtctgttgagtgactggtcactgcttcggtatgagtgtctccactgcacccttaggctgtcaggccgtgtggttgtcattgtggataggtgtctggggtaggactgtggattgcttcccttctttggaggtttgcctagcaccttccagtagcatgaaagctatcttcatggacaagtagccttacttttgagattaagaaactaaggtgccatgagacttagtaactagctagtcagagtagacagagtagagtagagcttgattccgagactttctacggatctccacctgacagccgaagtctgctgggttatggcctgcagccctgccagttgctctgtgtgaggactgccaaacccagggcagactcaggagctctgttggtgatggcccttagctggctgcttcttagctagggctgggctccgctgggtttgctgtgagcgtgtgggtacacttgaaaggcaacagtcaccgcctcagaggttgtgcacttgagatcattgatgccatcttttttaagatttggacgttttagtccttaaagaagataatttgctcccagaatggaagagtaggattgttgcagagactgggtgtggcctcctccatcgatttccaacccactgttatttaggaaaagaggttgataaaggtacatcagaaaagagttactgaggttctaagggcattccttactgtttttattcttattactcatttttgttgttgttgttttgagacagagtctcatgtagcccaggctggcgtcaaacttgctatagagtggaggatgtccttgaactcctaatgccccctctctctcctcctcagtgctgggatagcagggatgtatgtggttatgtggtgttggagttcgaacccagggcgttgtatgtgctaggcctgtgctctgccaactgagttctatccctagcccctaagaatttttattaatcaatgtaggcattggtaagtaagcacctatgcaccatctaagcaagaaagcagcattttcatgtgatgatgtaaatctacttcttnnnnnnnnnnnnnnnnnnnnacacacacacacacacacacgcacacacagacacacacgcgcgcacacacacacacacacacacacgcacacacagacacacgcgcgcgcacacacacacacacacacacacacagacacacgcacacacacacagacacacacacacacctaaatacataaatacaacccagtcagtctacatgatgctccacaagtggctgtgaggtgccggcagcctccgttgacacgtctataacacaactcctgcacctaaaaagctcatggaacatcactgggaagtgggaggaaacattgccggagccggaaggaacaggaagttcctgtgagatcctgtctcctagacatgtcagaagctgtacccattaatcctcaccagcaaggccgcctaaaggaaacctgaacgaggatgacagcaatagacaggcgaaggagagaagctcaagagcactcaactctagacaaagaactccaagcagctagtccataatgctgagagccggagaaatagccttccccagggaagagcacagcagttggttatccaaccctgaatggtcagccctgagagtgtacatatacaagtgacattacacagactgaccgggctgtatttgtctatttgtgtgtgtgtgtccaaggtctgtgacatcacaatgacgtcactagctctgggtagttaactagtgctaagcatcctttcacttccgttgagagctccccaagtctgttgagtgactggtcgctgcttaggtatgagtgtctccactgcacccttaggctgtcaggccgtgtggttgtcattgtggataggtgtctggggtaggactgtggattgcttcccttctttggaggtttgcctagcaccttccagtagtatgaacgctatcttcatggacaagtagccttacttttgagattaagaaagtaaggtgccatgacacctagtaactagctagtcagagtagacagtgattcaaagagcttgattccgagactttctactgatctccacctgacagccgaagtctgctgggttatggcctgcagccctgccatttnnnnnnnnnnnnnnnnnnnnnnnnnnnnnnnnnnnngctgggctccgctgggtttgctgtgagcgtgtgggtacacttgaaggcaacagtcaccgcctcagaggttgtgcacttgagatcattgatgccatcttttttaagatttggacgttttagtccttaaagaagataatttgctcccagaatggaagagtaggattgttgcagagactgggtgtggcctcctccatcgatttccaacccactgttatttaggaaaagaggttgataaaggtacatcagaaaagagttactgaggttctaagggcattccttactgtttttattcttattactcatttttgttgttgttgttttgagacagagtctcatgtagcccaggctggcgtcaaacttgctatagagtggaggatgtccttgaactcctaatgccccctctctctcctcctcagtgctgggatagcagggatgtatgtggttatgtggtgttggagttcgaacccagggcgttgtatgtgctaggcctgtgctctgccaactgagttctatccctagcccctaagaatttttattaatcaatgcaggcattgtaagtaagcacctacacaccatctaagcaagaaagccgcattttcatgtgatgatgtaagtccacttcttcaattcctgtatcacaagaagctaactggactctgggctggagggatggctcagcggttaagagcactggctactctcccagaggtcctgagttcattcccagccaccacttggtggctcacagctatctgtgttgggatctgatgccctcttctggcatgcagacatacatgcagggagaacactgtacataataaatgaatctttaaaacaacaacaacaacaaaaaaccaaacaacaacaacaaaaacccaaggtgatggtacctaaaaaaatacacccaaggttgacctttggtctccatcataaacacttgcataccatgtgcatatatatatataaaaaaaagataactaggattttagtcaagtcaagttttggaatactatttttgtttagctgtttttatcatgcgccacacaaatttctttttttgtcatgtaatgtgtaaattttcataatcattaaacttaagtttgagaagaaaaatgagcagtcaaagccctttcttttggctactttgcaaagcctgttcgtgccaggctcaggtgcttacagtgggtttgagtactgagctcagatcgctaatttattcttgtatgtaatgtcaaagattcatttttattacttttcagtcatgtatgtgtgtctctgggtgggtatatgcccataagtgtaagtcccctcagagtccagaagagggccttggatggatgggcctgaagttgaagttattatagctcttgagagctgcctagcgtgggtggtgagaacagaactgggctcctcttcgagagcagtgtctaccgttaacgactaacctgtctctccagcttgtatctaatttgcctttaaacagcttttaaaatgcacactgctgctgtgttgccgttctctcgttctctcgttatggcttgagcatctgtttatagctgtgagagccctgctaacgtgctttctcctctggcggcttccgttggcaggtgtatctgtcaggcgttgcacgagaagatcaccattttagtgactcaccagttacagtacctcaaagctgcaagccacatcctcatactcaaagatgtaagtaattcctttaaaaaagcagactcggagtttgttaggagattttttttttaaaatacagattttaagcagtgggcattcagggaaagaaatgcccttgagaagaaagtaaaacagacccaagagcaatgttaggggtttcttgaaggcgcgacctgagtgtgagtaacttagatgtccattgaaccagctagagcctcaggtgtgttgaaactcgggtttcccatcagagtgtgctccagggactccccgggaagccgggaagctctcttcccttcctttattttccgtccgtttcctggagttgagattcaaagctttgaggatatccaaaggacttctagaaatagcagtaggaggtctggggatgtggccccattggaagagagtctgcctgacatgcacaaaagcctgggtcacgtccccagcactccatccactgggtgtgctggtgcacctctttattctcagaggtagagatgggaggatcagaagttcaaggtgttcttatgtagagcgttcaaggccagactgggatacatgaaaacctgtttcatgtgatcaggcaagcaagcaagcaggcaggcaggtaggccggccggccggcaggcaggcaggcaggcaagcagataataataaggacgaccctagcaggaagcagaaatgtcagttattagtcctcatacatacagattataaaattgctccctcaaatctgcaagctgctctagggaggagattaatgatggcgaaggtactgttttcttagaggttttcgtttcgtctctccaagacctaagtcacagtagataatttggaagttacatcttccatgtgtcctgaattgtcatctactgtttgcctaaagggtatctgtactggctggttctatgtgtcaacttgacacaggctggagttatcactgagaaaggagctttagctggggaaatgcctccatgagatccaactgtgggtcattttctcaattagtgatcaagggggaagggccccttgtgggtggtaccatccctggactggtagtcttgggttctataagaaagcaaggtgagcaagccagtggaagcaagccagtaaaggacatccctccatggcctctgcatcagcccctgctttctgacctgcttgagttccagtcctgacttccttgctgatgaacagcagtatggaagtgtaagccgaataaaccctttcctccccaactgcttcttggtcatgatgtttgtgcaggaatagaaaccctgactaactcagtatctttcacaacaaaaccagtgaatgtgtgagcagccccccactcagagccgcctggctgctgtggccacttgatgctgccctgcacaagtgcttcgctgtgctgattcccgacacagtagcatggcaggtggtcccttgccaccataggcctccattccactcagtaggggtgagaaggctcatgggacagtgacaggaaaacaaagtgactgctgtgcctttacacacagctgggacagggagggccaccgaggcagatggacagcttggagtctccatgtgtgtgccgagtgagctgggcctagagggagttggggttagagcacaggacagtgacctggactgacatggcccctgttgttttatacctagcacggagggagtggggtctcctctgtgatttttcctctcccttcccacccccttctcactaggctatagcagtggcaattagaagtcagccttgtagttcagaaggttgaagaatatgcttaggtcggtgagtcagtttcccaggactgctagaagggacggttgtgagctggggactgaatatgctaggaagttacggtctcacggggccgaagcctgctggtgtgttaggcccaatgactgagctgtctctgaaagctttggggacatctgtttcttgcctccttcacccttggcctcccttggcctctagctgcaattgttccaggttctatctctgtcatcataggtgcaggctgtgtttgcccagatgttttcttattactccagctggactcgcatgacttcactttcgcttgattgtctctgcaaaggtcatgtttcttcataaagtcagatttattcatcccaagggttagagctgcagtgtcttaagggatagggctaccatttaacccctgaggaaaactcatcctactgaagtcaaaattagcagaggtgctggtgacaggctgagtctcctccttggcatgttttctttggtgtatgggtgctaatcctctgcagtgggggtgggggaggggaagggggagggtcaagttctccaccacaggtagaaaacagccccctgagctcgctcctgctcatgtttactgccttctttattcagcatcgttaaccactgagaatttccaacataacgtaacaaaataaaagatagtaagacaaaacaaaacaaaaaaacacatcacattgaagtgggacctgacaagaagccgtgaacaggcacaagcactagagaccccactcactcacacactcgcaagttccatgacaatgctaaactggaagctataatctatacacagaggagatggtgcaggctcatgtaggccctgggtttgctgcttcggtctctgtgagttcatgtgagcttagttgatttggagggctctcctggtgtcctctattcctgctcactcataggccctttctcttcacgtctgtggttttttctgagtcctgggggagagatttggtggagaggacaagtcactttataagcagaaagggtcagagactcagtgtctgtgtttactccctctgcaaagcccttccggctgcagttgtggaagggtacaaggaagaacttatacaagaaacccaacaccagacacactgagaccccacctccccaacctcccaggagcgccacccataggaccaagtctttcatcacacaggaggaacacaaataattaagctatatctaaaccacaggatccttctgtaatctcttggccaaagatggaaatgacaaattcgcattagccagagttccccatgtttgtgtacagttattctcagagaggtagatcacacattcttacagcacataggctgtgtggtgatagtggagcgcctgcagaggtcctttagtgcttgcttgatacttcatgcggctaccaaagagaggcgaggaagctgtcaatcaaagtcccatcaaataggttctcaccacaaagaagattatagaaggcaggatgactacccccttagcaacaacttagtgtgtcagccgtttcctatccccctgggaagaaagctccgattcctcaggctggaaaacaattaatttcatgtgcagagagctgagtattctgcctgcagagccagtaggtatagaatagctttgtcccctgtctgcacatggtgaccgttttctgagatcctgcctcctgcagattctgagttttagtttttagtactcaacaatttattcgtccactagcagggaccctggagagaggaaggcctgctcttactattagtctggcccctgtctaacagcacagaggatggctgcccctttggccccctctctggaaatgccctgtctatcagtagtttcctcgtgtgtcttactgattctgagaggaagggcgttattgtgttaacaagagtgcaaatcgaatcttaccaattgtgttaaacaagtgtgcaaatcgagtcttaccaattgtgttaacaagagtgcaaatcgaatcttaccaattgtgttaacaagtgtgcaaatcgaatcttaccaattgtgttaacaagagtgcaaatcgaatcttaccaattgtgtaaacaagtgggcaaatcgaatcttaccttctaagtgccgcagggcgtggtgcatcaggaataacttcctaattctttagctgtcagactgttaaaagcccaaccgcactgggattttcctcagtggagcaccttgattggggtggggtcgcggggaggacacgggagaaggtggaacctgaccaataacctgaccacttctcacttcagagctgttctcctttgattcagtgcccagtactctcctgtgactttagataaatcatttgagtctctcttcatgggataaaacattgtgaagatatctgcatattatctccttgggtcaggaggaaaccacctgattagatgttgtgtggaatgtcgcgtctttggtgaggatcttaaatctgggggcaagctttagtctggaatttagactgggaagtctgcacgtgactcgtctccgagggggcagccagctaaggctggctaagttcatcctacctaggcagaggtgctcgctacacctcgctgacccggtggattctcccatcatctatgctttttgctcctttcagtgcccattgtgtttgggccgtaaagcacatgacaagttggttttatattgctgagctcctagaatttggcaggaagcacaactctcacttgggtggcttagttgagctactacatagttatcaatggggatcacagacccccaaagcaatcataactgaagaccagttggctttagccagtttattggagttattaagtacaaatatctgcctctaaaattccttttgttttagggtgagatggtgcagaaggggacttacacggagtttctgaaatctggtgtagattttggctccctgttaaagaaagaaaacgaggaagcagagccctccacagccccaggaaccccgacactcaggaaacgaaccttctccgaggcctcaatttggtctcagcagtcatccagaccctcgttgaaagacggggccccagagggccaagacgtgagttcatctcctgctccatggctctcttttgggtttacagaccttgtaatccgttcagtcactctgctggtggcatctgcgtttgtcctggagttggacctgcgactctaaggtgttatgaaatgtcactggtaggattaacatagagtaaaggggaccagccctggctgtcgccttctcttggatgtgggctggaggacatcattgacatccacagtggctatgctactaggagttccaaaggtctgtgtgactggtggatgtctgaagtttaggattcaccacaggcaaatctaaggttattttcgttttcattgctacttcacaactgtaattttgctactgttatgagtcataagacatgtctatgtgttttctaatggtctcaggtgacccttaaaggggtcacccacaggggtgaataccactgacttagggtcttgctgtgttacatccgatactttttgttatttgtagtccatttacaatgtaggtggcagaaaggagtttcttggcctatctttgatgctttttttttagtcaaggacacagatgctaatgtagcccctgacagactttcagagttagctccctctcttccttatgagcccgagggccgcatcttattcttgactgagtgtgcagtagtcagcatagattcatgtatgactttagggcatatgtctgtaccacaccttagcctttcaagcaagtatgcactagtgctcctttaaaaagaaaatcatctcggccagctggtggtgcactcgggaggcagaggcagggggattactgagtttgaggccagcgtgggctacggagtgagttctaggacagccagggctatacagagaagccctgtcttgggagggaaggaaggaagaaaggaaagaaggaaggaagagaagaagggaagaaggaaggaaggaaggaaagaaaggaaggaagagaagaagggaagaaggaaggaaggaaggaaggaaggaaaggaaggaaggaaggaaagaaggaagggagaaaggaaggaaggaaggcaggcaggctggccatcccatctcttggcattgacatggcatgggtttgggtctaggacccccaaggatagcaaggtttgagggagttcaagtttatataaatgcatcatgtgtgcagataacctgggtacttctgtatatttcacggcctccctagattacttataatttgcaatacaacataaatactgtatcgacacttgatacatggaattactggggaatagaggccaagaaaagtgtccatgcatgttcggtacagacaactatttccccctccgaatccttttcagtttgtgagagcagaacccatacatgctgtgtctgactacacttgcagctgtcttcgctgcccacatccccagtctccacaccttggatgatcccggcataaatggatgtgttatcctccctctcttgtagacgtttccactcggctgctccgcttggctagcagtttgagccattcggtcattcttggtgtcttcggtgttgcctttgagcttacagccttttgtgggttaagtgtgcgccctaccgccgatctgttctcccacgctggcctgctttcctgctgcattgcctgcagtcaccattcggaggcttttgtgcttccctttcgcttacagcccctcttaccttccgcaggcagagaacacgcaggcagtgcaacccgaggagagccgttcggaagggagaatcggcttcaaggcctacaagaattacttctcggcgggcgcatcctggttcttcatcattttccttgtgctgcttaacatggtgggccaggtacatcatgacacctgtgccctctcaggatattcacacatgggtttacagtggggtgtgctgtgtggcagggagcagccagagtgttgctaaccgcagtcgagaattgtatagaagaaaaaaagtggggttaccttgtaagagcttagaggtaacaccttgtctgggaagttggccttggcacagcctgagccagctgaccatcctaatgaacgctctgggaccctcctctccgtcccacgtcttcagccattttgagtttctagtttggaagtcacgcaagtcttgccaacgctgtgtctcgcttccctccgcaggttttctatgttcttcaggactggtggctttcccactggtaagttcttctggtcagaattaaaggctctacgatctataggtagtagcttcattttcccataggttttaggaagaggtgggatctgttaggccttctattctaaccttcatcccttgaagaggaaaagtgaaggcttgctggtggggtgtgacccacaccactctttatccatatctggtcaccacctgcaccttgagaactgaacatcaggggtcaaagtttgaagggcagccgcagaaagcgttgtgtgagctgagaattgctttctggcacaaggcctttctcctaagcttaggttccttttgtttttacctaaatccataccttagtaatttttttccctcccatgttccacccatagggcgaacaagcaaggtgcactgaacaacaccagaaatgcgaatggaaatataacggagaccctagacctcagctggtacttaggaatttacgcaggtaacgtttagccatttggtctgttatctgagggcctgaggtgcttacgatgggcctgtgtgagtaaccagagctcctaggagtaattcagtaatgtcttagcagattaggagactccgtcgcatttactctgtgaattaattagaataatttttttttttaaatctacccggagaaagaggttgaatgaagactcttaatttgctctgtactggattttgaaagttaaactaggattgagcgttcagaaaaccagccactggaaatatgtgactattgtctattctaataggtcgctttagctaaatcttatatcattatatgaatgggcagggggattagaaacggatccccaccctgtggcttggattgttccaattctgactgaataagcccaggcctttattgaacttggatggaatcctctggcagcaaggccccccaaataaaatcattatcccctcacaggtatgcaaagctccctacagcacactgctcatctctcgggcttcactaattaccgaagagggaagctaagcagggagaggcccagtgtgcaggaattaaaactccttctctttcctaccttgagaccaacaatgttatcacgtctccgactgtgtgattcatttaacatttggtttgcccgactaatattaacaccccactctgttttcacaagagtgcttggaaaaagtatagagttagttttcaaaagaaaatcctcatctaaaatttcaagtgttcccacgggagacaggctttccttggcttgcacgaattaccgctgttagaagccattcacccaggtttagaacttactttgttgacgtctccctaagaaacctaaatccactgactggttaccgtccctaccggcagactgtgcgaaccctaaagggaaatagatccattatctattcaagtagcctgggcggccaaggaaaacgcagctgtatggagttttagaattaagtagctccaggggttaatgctgcttcattagaaggcaacatgtttaccacatcagctcttcccggtctttgtagcagtgtgagctacaagctaatggaaactagggaagcagagttagggggtagctcaggatagaatgcttgcctcctgtgtgtagcatgacacagcacaccatgcctctccacttcctatccgtgcagaatggttcaagaatgccttaatgcaacacagagtttgaacactgctcatttaaactgtgatatgtttccatgagacatgcattgagtgactagtttactatttagttatcttatgttaaaacatgatttgtatgttctcacaattcaaccgtttcaaagttttcctgtgtgtaagccaatgtgatattttcaaattctttaaagccactcagggggtttactacaaggagggtttaccggtctgaccctcttcccggggagcaccacatgatggtatcagaacccaccacagtgctagattgggggacttgtaaataccagctgggatatgcaggcagaaatctttcctctgagtgcttagtaggacatgcaatttgtttttaaagcctgtagtttatactttatctgcacataggtattttctattcagtaagaaaaaaaaccacttagtttttgtcagtgtgtctcataaatgtgcatcgcctttatgtagaacctagatgtttatggggaagatcagagatatttttataaactgtcgggttgtagaaggaagtgtgtcatttcctcaggatcctggctttcctttatttcaggtctaactgcggtcaccgtcctttttggcatagcgagatccctactggtgttctatatccttgtgaacgcttcccagactttgcacaacaggatgtttgagtccatactgaaggctcccgtgttgttctttgacagaaatccaatcggtaagtcagccgccgagctccccagtaaatgtgtcttgttaaggcgtgtactcacgcaacgagggtctgatggcattctggtctttgagaaaggaggaagtccctctgcgtgtctgcccattctctacagtaagcttccccaatacttctctcctccaatagcaaatctacatatcagctgcatggacttatctcggtgtgtgtgtgtgggggggggcacagcacacgggcactcagtttgcacagtgagttgtgaatccagttgtcactcggctcccagagccccccacataacttgcggacagagtgtagtcgcacagtttctaagacacctactgcatgtacacaacattggcctgtacccccttttaaagagtctcactagaaggaccgccctctgagccggaaatgaggggctgtgtgcttgcttcttgtcttgggggcgaccattccttttgtgaactgtgcggacttcgacctgactgataatgaagataagtctaaaacccccaaagtgtgatcaccccttggtaaattttattttatcttgtttattatgatataacataaatatattcgttatttggtattttgaggtagtatcttgctactgtagccctgggcagactggaagtcactatgtagcccaggctgaccctgaactgatgaagccctgggcagactggaagtcactatgtagcccaggctgaccctgaactgatgaagccctgggcagactggaagtcactatgtagcccaggctgaccctgaactgatgacaactctcttgtcttttcctcacaagtactgagacgctggcatgcaccacaacattcgttttaacactgtcttaaaaatgaacagcaacccccactttccttctccataaccttaaactctgtggcttataagtacgcgtttgttgcgtgacatcatgcctttgcatgaacggatagcggcccccatgatggtcctctgacccatttgcttctgcaggaagctccttggtccaagttcctagaaagcgttagtcatcctcacagaccgtggtcacctgggggtcagaggtggggctcgggcagctttgtttatgcaggtggaaatcaatgggacctgtcacggaggactgtggtaacacagccgccattaaggagctgctggatcaagagcagagcatttgcatagtgtcaggtgagcaatttttgaagtaggatgtgttggtgggaagtacagaccctggtgcctgtggctgtcttggctccctgtgagaatcactggttaaggctgtggcagtgctcataggccgggtactcaatgtccccgcaccttggcattcacatacgtgaaatggggacactgtctgtatctatcatatttaaaactaagacttaagcaggtgagagattttcagtgctccaagtggcttcagccccactgtcggttcccagcgactgagaacagtgactggaagttcaccggaagtgcagtgttcttgcccgtagggtggaattccgacctttcctgttttacgtgattgttgtgaaccacagttgtcacacgcggtcgggctggggctgtggtcagaagttagctggaggatttgctgctgtgatcgatgtcgctgctcggcttagacctgagagttatacttccacccggaatgctcagcaggcagtgctcttctgttgtgactctgctcccggtcctactaaccaggtgcttcatgttcgagaatcgtaagcttttccttgtaccaattttcttatttattgaggggtttagggcccagtctaaatcctgggtaactaattttatgtcaagtcagaaggattcatttggcttctctgtcctgagtctatgagcaggatttttttccttcaatgaaaacagagccctaatgaaccccaaacatagtccttacatgacagaaatgtaaacacgaattgtttacctcttttagtggagtatttaaaataaaatacattttaaaactttttaagacttacgttttcatatgagcaaaattctgcacattttaaaatggtgaagagacacagcctatggattatgctatctatagtctatctataccattaattatttatgtactgcagcggtttatgtaacaagaatgggtacagaagcatcctgttgtgtcatgccgtctcggctacgcagcgtgttggctgagcaatgtaaagacacaagcaacgtgtctttagaaggtgttgcttcacagacagctcccaggagcccctgaggtcagctgcagtgcctcgtcatctctgcatctgggcatcctcccagagtctagataatgtgagggaactaggaagatgcttgccagcatccagtgtccagcaagtgaggcacgggaggacaatgttacagaaacgtgaggtgaggcctcatagctttgcccctgcagagcccctcaccacctctgattctcagagaccatgtgccgtaatttagacgtgtcttggtcttacagtcatgggacttgccatgctccctactcagtactgctatctcgtggcccatgtcctccagaccctccgctctggtgctgatcagtgggtgacctttgcccttgtccagagacccaggttttccttggacgctgctcaaaacactggctaccgagccttcaccccaagttcactgagtggtacttaacggagagagtgagtggggtcagacctgaagatacaggtttcttcttttggcccgagattgccaaaagccaggtctccccttttcctcttgatttctttcctcttccttcttctcagcgctccccacccctctcctttgaggtgacttagaggtggctcttacatccattacagggcctcacatctcagctgcagccctgatcttccacaccaacatttaccttccatgtgtagcactgcagttcaagaagatgtttataaacaaactctggtcaagggtgttaacgcaagtagcaacacccagcaggtttgctttgccagggagcctggacccgggaacctggagcctggagccgggaacttctgacactgagcaccagggggcagcgtgagctgcagaattgcaggcgcagagcccagagagctcacccagcgagacctgggattgctgttacagccttcttgggaaattcccccttcctagtttgtgcctttgtaccttgtcagactccacagaaaatgttaaaaagcattttcttttttggccatttattgtgacagaaacattagtcaaaccaccggcagccctcctcccagcccctccggggtgcacagcctaattcagaagagtttttttatttgtgaagtcacctacgagcccagtttccctaaggtgcattaaagaaatccttacctgcttcttgggaacacctaccatttcagaggacactccgattccccactcaacactagacgcaggagtaggcggaaagggtcctcttggctggatgtatttgattcctatagggtcagttctgacttagtgctgttttcctctcaaaatatgagggttcgggggtggggagaggagtggagggggagagaggtgggagaggagacgatcactgaatttgaggttggtttccacgatgtccgaaggcacagtcctttttttccatccaggcacgcaacatccccttttgcttttggaaacgggagagtggctggtagtggtcccgtcttctgctgcccagttttggtacaggcgcatggctgacagcatcaacttcaggttcacagaaatctactcatttgtcagtctgcgtgggagaaagagagttgctggcgccggctgacgggcttgtctgttttctctgggagacacagagttaatcttggggtggtggtcagtgtgtttattcacatggccgatttttctgccatgtgcgtgagcactggtgtgtgcagcatcacatgatgttaaacaaaagtatcaattccgagtcaccatttttggttgagtatgtgagaaataaaatgctggaaaagaggggaaagaagtacactgacttgtgttatttaaacatatatttatattatatatgtttaatgtgaattatattaaattgagaatgtcaccaatagtcctagactttaagagagactttctcttacccatcctaataaaaaaactctagagattgcatagtgattaagattctcagctcgactgagtgggaaattgggcttgtcgatgacatcacaaacataaactattctgaattaggctctgcatccgggaggggctgggaggagggctgtcagggaggagggctgtcagtcagtggtcttaatattttcctggctctccagcccggaaagagagcgttcagaatctggggtaagttgctaaagaactcctgaggaagtgagaagagagttgaagccacatgggagtgtaccatcagaaaggctgtcttgctgcagcattgatgaaaccgattgtcaacacaccttgtctttgccagaaaagcaagagaagaaagtcctcaatagagaagaaatctaattgcaggatacccgtgtgtttattcagtcccagtgaccactggagttagtgctaaatgcatattttaacaagtataatacagcactgtcaaaattaccttgacaataataggcctgttaaattatagctctatacatgtggaggtaaaatggctctgcttagcacacattaatctatgcctgttcacacaagtgcttctgctgagcaggtagcatgtttaaacaagaaatactggtcttaaaacctctgatttatggtaggtgttttgacacagcatcattcaggcgatttacaaggcacggcttcgtgttaaaatatctcaccggagtcatcatttggcaccgacataaatattcagcggtggtgctggaaacgggtgagatgcccgtttgtgccagatcatcccctgtgtttcctttcaagtgagatctgccgtggatacagctacaagagatgacagtttcccttccttgagagcggatgagctgtaagaagttgaaaataagaataacggcgtcttgacagctgccgtggactcatcctgcccacgttggctttaattctggcataaggcccatgggttaaaaaaaaaaaaaagaaaaaagaaaaaagaaaccaaacaacccctttccttgctttatgcacattgtaaagaatatatttacatgtacatgagttaagtaaagagaccttttctgttcaaaggaagaacttagtcatcggcagaaaagctttgttgcaaaacaaaaacacacattccctgtctccttttttccttgttaataataacaaacgtgagcgagtacagaagggttacataaaagatcgcgttaatcatcgtgatcctcaatagccacgtaaatattatgttttctggtttgaattgaaatagctaatggtttgaagtaggtgtggcaattaattcctgtcaagttgtcacgtattaaaaataatgtttttttttccacataacaatggttatatgtacttaaactcttatgggggggtgatattaagtgatattttatgggcgttgcccatttactgctaatagcataataaaagcctttgttataagtttaaatagttacatagttacatacatctgattgcggttgttatttaatcagtgatctctctaactgacatgattatagtacttttctacagctggtacacattacactgttttagtgtacggttttaaacctgctaaaatgttcctattgctctttatttgtggattttctccatgataaattgggcatggaaatactagcaggtgagtatcacacacacacacacacacacacacacacacacagagagagagagagacagagacagagagagagagagaacgagctagctttgtgttcacagttgtcaaatagaacatttagaacataagatttggggagctgctaacctgtttaaaatgatgatcatgttgtattacagaaagttaaaaggatgacattttgcttaattatttcaaattattttccactaaggcatatattaaatattacatgcatatttatatttcatccttgtccactctatcataaatgttactcattttgcaatgaacaaaactcgggggaaaaatctcaatattggcatcattgagcctgtgacattttatctcacataaagtatatatatatatattttttggtcttctatccagtttatcatagttcttgttagaatgatagttattctttatagtatttagtatgtgagttaatgctagccttgtgaatgtcttctgtgaaggcggatagttctatgcctacgatgttaagtgtgtcatctactgtgagccatccagtgatttgggatctgtgctgtttgagtttccagctcatttagagctcggcatgtgtgcattccttggccattgccttctgggattgaaggtgcaaggtcctacagtgttgtattttgaaagatttctccccaatgctagttctagagccagaagtgcttcgagcaaaaattatattgaggaatgttcataatgtaagttccgcttttgtgcaacatttccagagaaaatgggttggagttctgtaccaagttcatcatgaataaatattgaagctaggggtagtctggctggaataaagcatagtatggggtattgtgtggaagtcagtaaggactagaattctgtttgcttgctttttttttatagttaaaaatccatgtcttgtgttagctttgtgcttcctgctgtcttcaaacgtacctgttatttcatcaccacatttccctgactcaagatcgggcactttgtacttgatgagtaaacgcatattggtttgatagagcaggcgaaagctttgtaggtgcagtctcatctccccaaactacgcccagggagaacaatggagattgatggtcattaggatatgaccgcagccttttgttttatagttagcgcatgtatggaatcaagctctgctttcctgagagcagctgacaagagatcacagatagatcactctagaccgagtccacagagtgggagggcccggatggaaaagccaacactggttcctcagaagctgtgattcataatctatgattctggcccctagatgtttaccaactgaggagaggaaaggtcaaacacccaataaagttcgtgaaaggggacttttagccttcccttaacttggggtttggggtgctttcatagttgtgttttataaactgtgtggcccaatgaaacaggtgaaaacgcatctgttttaagacttgggccgagtagagggtgggaggttaaggcagactgaggttctctgctcttatctggagaggccacagaccagtgattgattgcttcagtcccccggcctcggcctccaacaagtaagcagaggagtttcttttctcctcaggcatctgttggttatcttctatggacctctattaaatctcatcttcacaagcataagcctaaatagccctagacaacaaattattttttaaaaaacataaaaataacccagacactgttctttgattcggcatagtactgacacaattggaaatttccagttgtgggtggagctctagattcacacaggcccctaactcattcccatccatggcctcagagtggatctcttcagcatctgtgacatcagtgactggctctgatgtcatgaggtttccaaaagttcttctcctggtacttcagggtgaattgttttcaaactggaaccatgctggtgggaggatggagtttggagacttgagtacatgattctgtatttaagatcacaattattgagttatagcagactcagaaggctctactctgacccagacactttcctgatccaccagagaagtcaccatgcaacagcttaaaccaggaaccgggcaggggcgtccctttatgaagacttgtgtgcactctatgccttctagaagtctcaacaggaaatagaatacaagcaatgatattttcctctcttagtaatattatcttgcaatcagccataatccattgagtattctcattcttggaaaccaggattaatctttgaggggaaaaatccccctctttaagtagaagccctttaatatctagaagaaaaacttgacaagcttcaaagtgcattttgagtggaagtttattaaaatgctgtggttgtgtagaaagctatcacagaatcaagttctccggtctggaaattcttttgctttcatttctttctttctttcttttttttttctttacatttgcattttaatagattgtatcacgtgggcaaatgtttcaacctcctgaacacctggaaagtctattttagacttgttctgggtgtttggaaatctttagccagacgttattcagcatgcagtcagtgtcatccaggtgggaaaatcctgcctgcaggtctgcctttgctgcagagtggagcaccgtgcagcttgtgggaaaacatccttagaacaggtagccctgcccggggtggggggcggcaacccctcctcctcactttgggattagtggatagcttccgatttctcactgaacttaaagcagaagtttagagatttttggctcaatggctggactccttttgagctcagggaagcctaggatctgatctagagatcagaggcccagttaagaacagcggcagccggtacctaggacatttgcaaagctacttcagtgctagggtatttgttctgacatatattttgtcacgcgtataattgcacacatgtagatcatctgtgctttatggcatagtcagagccctggttaatacattttcattacttttaagtacataggagtagaagaacaatcccgtctcaaaacagaataaaacaaaagaaaacaatccaacaagaatagatgcacaaggaaacactgctttcttgtaagtcatcatgaccaattttacagggggctggagcaatggctccgcagttgacagcatcagtggctcccgcagaggacctgggattggtttccagtctgtgaccgactcaccaacctctctgaccccagttctagggtaatcaatgcttgcttctgacctctgcaggtgttgcgtacatacatgcaggggtcatacatgtacatacaaacactcatacacataacagttttagataattaaaagaaaaatttcttctgttagagacagaatggtctagaatcatgaaattaactgggggcagggcagtgtgtggactataaatttatttttccttttttggagaacaagatagtattgacatattaaaaactgtatctcatgctagtctgaatctctctaaactccatattgtttatcataaagatgagagttaaacatggtttagtgtgtaccatagactgaagttctcatcagtaccaacttttcccttttttgtccatccatccgtctgtctgtacgtccatctttcctgtttttttgtttgtttgtttgtttgagacagggtgtttctgtgtagccctggctgtcctggaacagctttttgactgggctgaccttgaactcacagagatctgcttgcctctgcctcctgagtgctggagttaagtggaaaagaatatggacctcttcatgaattcgcatgccttccttgcacggggaccatgctgatctctgtatcgttccaagtttagcatatgggctgccaaagccttcgcatggtgctggtcttcatgtggccatgttggtgtgaggaaaagtgactgcattccttccctgtggtggtgatcatgtggcgggcactggaaagtcattctcccttgactttcagactaaataagtgggtgttgacatcaccagccaagccagcatgatgagagggggcactgtgtaatctagacatcagctggttatcacaaatccagatggacttctcttcctttaggagtcatccggtctgtaggccaggcaagtacatccagtgcttcttccataactcaggagctccatgcgaagagcttccgcttcctccacgccacattgtctgagcgagcatccttcatccgcactccagaagctgtaggagatgaaagctatttagttgagctttcaggaatgtttctagaatgttctttattagaattaccaagtgctaagatgacaggtcaaagtgtgagcttttgggctgcagaacggggccacctcagttttggatagatgttgcacatcatctatcatctttttttgtttgtttgtttggttttttttttttttttttttttggttttttgagacagggtttctctgtatagccttggctgtcctggaactcactttgtagaccaggctggcctcgaactcagacatttgcctgcctctgcctcccgagtgctgggattgaaggtgcgtgccaccacgcctggctgcacatcatcttttaaccccctccatcctcacatcggcttttgattgggcgtcagagtggacagaacactggttgtcgactaggatgttctgggttgaagcagctgtcctcagtggcgctcatggtcccgtgcgtgtgtgagatttcgtttctcatgataccatgtgttttatatcatttccttctgttaaaggtgtataaggcagaaactttggaaatgaaccaatgggtaggtttacccagcaggaactgcaatgacccctccttaatttccctgtggtgactgcgagccaaggtagtatgtggtgaagaacataactttggaggctacctacctgtctgcagatcacagcctcatgcatgccagactatgaggccttctcaaactgcttccaacaccataagtagcatgggattgatagaactctgtgtgtgtgtgcttgcgaatatgtggatgtgtgtgatgtgagacactgcctggttcataggtaattaaaattgattggttgaatttttcttttttgactgttaaaagatgacatgatacaattttagggattttcctccctctgactgacaaattctaaatcaatagcctaggaagatagcttagttctttttctgttactgtgataaaacaccagaactgccaacaacgtagggaagagaaggtttattttgacctatggttccggaggagtaagagtttgtctcagagtggggaggagcagcaaccaacagcagagggggcgtggcagctggaccgggaagtgagagctcacaccttcaaaggcaggtatgaggcagacactgtgacctggaagtggcatatgatttaaattctcaaagcctgtggggagcgggtgtggcggcagtcccaaaggcgccagagactgcagctaagtcatatgacttgcacctgacttcctcatataagacacaaacatcttgagtactgcgcaggtgtaccaggatacaggtgaatccaatttggtggagatttgcccctgctgccctgattagctgaagcctcgtgactggcgagggggcatggcctgcagtgcgtggatgagagagagtataaaaggagtgagaggcccagggttcgggggagatatataaacaagggagatataaaaacaagggagatataaacaggggagatataaaaacaagggagatataaaaacaagggagatatataaacaagggagatataaaaacaagggagatataaaaacaggggagatataaacaagggagatataaacaggggagatataaacaggggagatataaacaagggagatataaacaagaagaaacaggactgaataaatgtgtgcagaaggatcctgtagcagcgtcgttcttcctggccagttgagcgcgtgcaacaaaagcccaccccccagtgacgaacttcctccccagacagtgccaccagctagggcccaggcgttcaaatacctgggtctgttgtagacatttctccttgaaaccgttatacacgttcccatacgcagcgggtttgcgggaagcgtgctgtcttggctttatggaaaagcagatcacctcagacgaacaagcctcaaacgaaaccggcattgtgtggctttgttgctttgcgtgttttgtttttgtttttgttttcaatggggcttagcttcattccagagttcactttaaacttaatttggttttacaatgagagctcaattttgcatgtaagtaccaaacatctggtttactttttgtttgaagatgatatgactgaagttctgtacagaagtctatttgcaattaaggaaagacggtttgaaattctataaattgagttctatttaaatggcactttggaatcattccaggtgagaggatggttgtacttcctcggagtgggagaaacttcttctttttttttttttccttttttaacactattggcagttaaaatgtagagcttctatgtattcaccttttgcaaaaagcgtgaaaaatgacaaatttcacaagtgaaatctaaagttgacccaaggcagttttagattgttgggccttcaaattttattcctgggatgtttttagagacattctgtggtttgttcactgcagttaattctgggcactccttctccatgtctgtcaagcggtcgttctgacgcttcaaaacttcctcttgcgcaaaatacagttacggcagcctgagaagaaaatgagatttctagttggttcttcgaagctctgggttatctttttagaacattgaagggtgtaataaatcaaacagggcaaatataactttctactatgtcgactgccccattagcatcaataagccagcaatttagatgccataaactactggctgattctaatacccttgagagatatccagatacatagctctgggtggagagatctaacagaaaagtgcttgctgttttgctgccagtgctgaaggtgtgtctgcaggtggggagcccctggccaggctcttcaagaggggaagtcaacattagtcatgtcagagtctccatcaccagctctgtgctgacatttggtgaccctgtcacactataggatttctttagaaataattggaaagaattttttttttagatttatttatttattatacactgtagttgtcttcagacactccagaaggaggagtcagatctcattatggatggttgtgagccaccatgtggttgctgggatttgaactcaagaccttcagaagagcagtcagagctcctaaccgctgagccatctctccaggccctggaaagaagttttttaagttaagaaaaagctaagaaacccctaaagccgacaggttgtggaaagataccgaagggtttcacagcatttccctgcccattcctttgatgtctcagagatcagtcctatgacgggttgtgtctgttggcaatgacaaatctagcttcttatcaaaccgtggatcggccgagagtgggacagatttggcctccttccctgtgtcctgtcacttaacagcaggcttcgttcatttattttggcaacttaaacttctccaaatgttgtcagtttccttatctcccttcacctgctgtcttaacaatgacaacagaaaacaaaacacttaccctggtctctgactcccgagggtctgccatgtgggtgcacaattcctcttgttctcttgtccaggcctcttggtactgtccccattcatttacttgagggttgaaaaaaaccaaaaaaacaaaaaaccttaaagaacaagattcccacgaatcgttaattacagtgagaatttcagctcaacatttactaacctctcagcatgtctgtgtcctaggaatttggagaatactggatagtgtattctctgttctccacggatatcttttctgtttattttgggcatgtacatgtgtggtgtatgaaaccgtttgtgtatgtgtggtcgagtacgtgtggtggtcagaggtcaatcactctctcttattttttgagacagtctttcaccaaacctggaacttaccaatttggtgacattgctaccttgtctggccagcaggcctgggggggtgggggtggggagggggaagggggcacaagtctctgccttgccaccacctacccactgatgctggagttactgatgcacagcactgtgcttgactggagttactggtgcacagcgctgcgctttggggacctggagtccacccctcatgcctgcctggcaggtgcttcagtgcccaacactctcagcacctccttgttcattttctaaagatgtcttactaatacccgtggatcaccacgatccaactgtagtaacatttctcttttctggtaaaaattgaattatttcttctcaagtgagggtgggagtcatagcaatcggaaatacattaacattctctaaaacttgtgtgggcttagcagcccaccactcacccactaggaatctaacaggctgtgctccagaatgtgacatgtttgttgaaattacaaagtctaccttgagtctagtgtggaagtgagtgagaggcatttcagcttctccattcctgctttccttattctgtccagtcgactcttgcctccttgtttgtatcagtcttcgaaaggattttatatttggaaatgaattatttctaaagccacgagagaaagaaaactgtcatggaggaagagctgctgtttctggatgacagatgacaacttctgtcttatgcctctccattttcttgggtcattccccagtatattacccaacctgcatgtatgtgtgtgcatatgcctgcctgccttcctgcctgcctgtctgtctgtgtgtgcacatgtacatgccaagggcacacagctggatcttactgtactgctctgaccgcacttgaatgtcttgcctggaatggtcctactacaaaccccaggtgtatgccaccatgccaagtttttataactttatgaccaaccaaccaacatgtcagaaaagtgttagctctgagatgtataacatttgctattgtgcaggtgacttagaaccatgcttacatactgccatgagatgttctttttttttttttcctgagctgcatttttgagtgggaacactggaatatttgttgtaatcttttaaaaaatatagacatagaacacaaattttcgtggctcgttcctataatcccagcacttgaaaagttaaagcaggagggttgcctgggttcagggtcagccttgtgcgtgcatgtgtgcacagtgtgtgtgtgtgtgtgtgtgtgtgtgtgtagagatcagggggaagaaaacaggaaaaacaatttcaaatcttattaaagtgttattatcaactgttctaaaacatccataaagacaaattaagcacaactgcatattcttctagagctctttaagtggcctattagaaatgcagtataatgtttaataggattaattttcatagattattattatatttatttattttgtattggtagtgagtgtgtggagttcagaagataacttctagtacttggctctcttttcatcatgtgggtcctggggactgaactcgatcatcagctttagtgacaaacacctgtccccacagaatggagatttcagaaggtccttattggaggaactgaggtcaaacactggtggtcattttacaattccatgcgcctgttctctaggcccacagaaacgggagaagcacagggtgaacctccttagtgcagatattttgatgtcagacttgggggcaccagggctcacagtgatggatgactcctgggggtgactcacggggaaggctcacagcgatggcagccgagagtcgcggtgtacagatgcggaaggatcccacagacagacccagttccttcatttgcttatggagttaggctttggggcagagttcagagtgtggctccttgtcctttactcagaaagaacaaattatctcgttactcatttcgctggccggtcactccctcattttatatttacaagaaagtttaatttgtggaatatgtaccgagagagataagcaacaatagctaacaacagaacagaagagtgatgataatgtactatgattaaaagcatttaaaagtttgaattatttgtttctggaatgttccatttaaagaccgtaggttgctaaagccgcagatgaaggtgaggctcagggctttgtcctcactgttctgtgctctggagaggtcgacgtgtttgggggaaaagcagtctctgggagtgtgaaccctcaaaaaccaagtgttcagagttagataacttggtctctgttttttcccttgtagtttttcataagcagtaaacgatgggatagaaagctaatattagctatttttttttaatttcttatttagaaaacgtaagtacatgacttaattattactttttgtgcttttggaaagtgcattttcgtttcttttatgttttgatgttgtactgcttgttgctgtgataaaacacagcacaacacaaaacacaaagtttggagctaagacgaaaggatggactaccccagagactaccccacccgggggtccgtcccataatcagccaccaaacgcaggcactattgcatatgccagcaagactttgctgaaaggaccctgatatagctgtctcttgtgaggctttgccagtgcctggcaaaatagaacagaatgctcgcagtcatctattggatggatcacagggccaccaatggagaagctagagaaagtacccaaggagctaaaggtatctgcaaccctatggaggaacaacaatatgaactaaccaggaccccggagctcttgtctctagctgcatatgtatcagaagatggcctagtctagttggccatcactgggaagagaggccccttggtctagcaaactttatatgccccagtacaggggaatgccagggctaagaagtgggagtgggtgggtaggggaacagggtgggggaagggtattggggacttttgggatagcatttgaaatgtaaatgaaggaaatacctaataaaaaaattaaaataaaaaaaaaagaaaacgtaagtacatgacttaattatgactttctgtgcttttggaaagcgcattttcgtttcttttatgtttgatgctgtattacttgtggttgctgtgataaaacaccatgacagtcatggggtgaaaatctcggcagatggcaggagcccaaagcagcaggatccttcacacagcacacaggaaacggagaacaggaagtgggtcaaggttacagctcttaaagcttaccccaagtgatgaacttcccccatcagggtcatctcttctaaaggtcccatgaccatccctaaacatcaccaccaacagggaccagatatttaagcccatgagcctatggggacatttctcattcaagcgaccacacatcagtgctcattgccaagctgatagaatcaaaacccaccttggagacagaccactgggcatgtctatggggtttatcttgattacatcaatagaaatggaaagacccgccctgtatgggaagccctgttcactgggtgggatcctgaactgggatggcttctgaaggtggatgtggtatgacccactgctctgagcttctgccccttggctccctcacattgatggactaaaccctcaaactgcaagcacacgtgagttcttaactgacgaagttgcctttgctggcgtgttttatcatagcatcagaaaaagtagtaagaaaatagtttccattttaaaattacaaattcctaagttctaaacgctccgtccgttagcaggtgaacagccggtgtctcatttgttaatctgaggcagcaggcctgtgtaagacttcagtttctcctcttcagcctcattcctaagagtccttttgtgtgtttactaaaattcattatttacgcgctgataggaatagggttggggaaggtcttctaccttctgtgacctacaatttagttggagagattggatatagaacttaattcatcctcaatttgagcctctttcttaatagaagcctcagaagtcttcagttctttgaccctttgaccctttatgctttgttgaggacacgcactagacctggacaaaagccaggtgactctcctgattagttgttattgtcaacttgacacaaccaacctaaagctacctgggaagggggagcctcaactgaagaatcgcctcaatccaattggcctatggtcaagtctgtgaggagttgccttgacaggtgatagacatgggagggtccagcccactgtgggcggcaccatccctaggcagacccatctaggctgtataaaaaaacttgtagcaggatgcaagggagagattagccgtctagtggctcttgccttgagtttctgtcctcaaatgatggactgtgactgggaagttttatgtgaaaataacaaaattaacccttccctcctcaagttgcctttggtcagagtattttatcacaacagaaagcaaatagaagtagccatgtatctcaatggaaggtcataaagaagtgaggcttagttggaaagaacattgcccctaaagggccaaggactatatgtgttctgatttgatcagggaaacgctgctggtctgctctctctacccactccagtcttgattccacctcttagcatttttcatttgtcttgctaatttgtgtttgcttatgggccttaaactctgtagccaatgattgctttgaactcctgattcccatgtgctagcttgacagccatgccccacctctggtgtgtgtggcgctgctctgaaatgtttcatgcaagctagacaagcactgtactaactgagctacatggccagccccacctcgtagtgttggatatatcaacctgaacagcctgagctatctggcttgtcacctttgcctcctggttgtaatgtcttggtgaattaaaactctcttactcctttctgatgaaaatattaacagtttccaattgtgactagtaggttcattcagctttaagggaacctttcagagatgagccacaggactttcatctaagggagtggagtccatgacagccgcagagattggattttatttcattctgagcctacactggtattatttaacgcaaccaagttctgaatgctggtagagaacacagctaaggtcatgggctgaaaggactttgatgtcctgcagacgcctgatttccccctaatatgcatgaaaagcttgtgcggtctggctctcaggggatgaatatttgttcctgtgggttacagtagcagacatgacctgtgagtgatgggagatgtcgggtagaatacggatttggaggaaaaggggtaggaacgaatatgaaaaaaattagccatggaaatctacaaatttccaagactattccggcagacttttcagagggactttaccaggcacggcaggcatggtcccacaccctgcaagcggagaatttctgattaaaaaaaaattttttttaaccaaatgagtttgcattcaaaccctttttcctcgcgcaggaattcctactctttcccttcgcgcgttgattctgttggggagggaacacgccatagacggttgattcttaggaccataccgttccggaacagattttggtaacctgaattaatgaaatggtttgggagtcattttgctcatttttgcaagaggagactttgtgtagctgcagagtggttgggagggtgcgtgtgcccgtgtgtgtatacacaagcatacggaggccagaggtcaacattggctgacttctgcagttgctctccaccctagtttttgagacagagtctcaggagcctggatctcagccatctagccaggctacctggccagcaaaacacagggatccttctgctgcctctcttgcctaacttaccacttcaagctctttcctgctgagccatctctctagtccccaagagaaaactgaatcacttgccaggctttaatgtgtttgtgaattccttggtggcccttcacttgctatgggactctctgctgactcttgttcagcttctggggccaaaggccatctttggttctcagcaggtagacaccttccctcatgacagcgagctccatcatcagcacgccgggtgtgggtggtgggcatgctgggtggtgagtgcgtgccagagtagaggtgcagagacgcattttctgtggctggcagcagccatgaggggagactcagagaagtcgttggtgcaaaggcagggggttgaggaagaggagctgtcccaaaagttggggctggggacatggaaatagccagggactttggcatggactgtagaacggattggaggtcaacttggaacccacgggtttccatttgtgcagttgcctactctgtaccgagggctgtccgagcagttatggaggcacatgctggtacatacgtgattgaccgtcaaatattctgctctaaggcctttttgttttcctagtagagcacccactgattgagggtgttgtactaggggtgtggggtgagagaaatagagcaattgaataggacactgggtggctcagtatcttgaagctgcaaagaaggaacacagaaggaagagcaagacgaattcttccatttgttacattttaatcccgccttccttgaggtagaggcaaaccagaaccatataaatgtgcatgtcttttctgagcactcccggccccattgggtatggggctgtggaggtgccgaggctgggggcacttggggccgggagtatttatttttgctaccccccacaagcttaccctcacgcttttgtatcagcgccaagtttctgtgttgcagctgccacaggcagaggctgggacgttcctcttgctctgaacttgaccactggtgatttgtttgttttctcacctttactgacacctgggcttggcaatcccttgtcattcttcgtctgggtggtcaagtgccagccagacacagcattggtctcagttctcaccatgagcctctcacagtgtctcttttctcgatgggtaaataccgggagttcttctctgtacagtcactttatcttccatccatcaagttgggcactgtgtctcagactaggccaagaagtctacaaagacttcgggtcttttgttctcatgcgccttgaatgggaaaggcagacataaggccatagagaataagaacagaaggactgcatgtatggagggccaggaaaccagaagggtatgaaagggggagcttattggagaagctgggcggattggagaagctgggcggattggagaagctgggcttttggcatgtaagtgtctgtggtaaagctaagatgtgagtgcatggttggcttgagggtgagcctgggacaggggaagggcgtggctgagtagtgctgagtggttggcagggatggagggaggatagcaaacccaggccaggggagagggtcaggagcgcaggggacactctgttgctatatccctggagaaatagggggtcttttctgtgtgttaaggtgcctgttgacctgacctctctgcttgtccagtctccattttattgggaattccacaatggactagaataataatagtccacagtggactagaaggccctggttcacagttttatttttgtttatcctgaataggaaggtgtcttaagacgtcacagctttgtaagcatgttacaactggtccgagtttaacctcccagtctgtgagctggctaacacttactggaccagtactgctttcctcggttcctgtgagtgcctggcagagaggcatacaccagcctgctaggtctttaacccccagatgatttcatagggagtgaaataagatccgttcatgtgcatacttaagttgagaccgatacaaatggatatattgcctgcagttccttttattatgaatactggctgatacttaaatattcttctatcgttgttcgttcgagtgaagcctttcagagtctgtgcgtgtggagagcagctgcagagacctggcactctactttctgtgggactccatccctagaggctttctatatagtaaggcctttatcataaggaaagatggacattttcccttaaaaatacaaacatggcttagtggttccccccctcaacccccaccccgactcctccttccttcacaaataataaaactttggtgcttaatcagggttccagatgtttgtatgtatttatttattcggatatttatagtgtctttgtcaaagcagtttcgcctccctgggtgcattccagaaatgttaaaaacatacatggtaaagccaccaagatcaaagacctgggtcttgtgaactctttgcaagcacattgggtcgggacagtccttaaagcgatttatgttgagaaaacagaatgaaagctctcactgtccacggcgagtcttgtggaatgttctggatggagactgcaggacctggcaggacctggcctgaaggacctgccctgtcgcagactttcccctctgctggtgtgtgtgtgtgtgtgtgtgtgtgtgtgtgtgtgtgtgtgtgtgtgaacattgcttagaagcatcccaacagtgcaggacctgcaccctcctggcatctacagagtcgattctctttctatatgttttgttgttattttgacaaagattctcataatgtagtccagaatggctggaactctctgtgtagcctgggcgggtctataacttgtgatcctctgtctcagactcttagaggctagataagaagcgctcaccatcacaacatcatacccggttttctgtgtgttgctatctatgcccttgctatttcttcctttaaaatagagaaatgaactatcatttcaatcttcttaaatattgatcctgtaggatcttacactgatcactgcaagtatgggttttattgtctctatattttaagagtacgtagtatctacatcggcacgggaagcagtaaggcttcttactgtgagtggttaatggtgctgactagtctctgtaaaggagaaagaccctcaagaaagaagcattagttgagccaggcaggactggttaatggtgctgactagtctctgtaaaggagaaagaccctcaagaaagaagcattagttgagccaggcaggactggttaatggtgctgactagtctctgtaaaggagaaagaccctcaagaaagaagcattagttgagccaggcaggactggttaatggtgctgactagtctctgtaaagaagaaagaccctcaagaaagaagcattagttgagccaggcaggactggttaatggtgctgactagtctctgtaaaggagaaagaccctcaagaaagaagcattagttgagccaggcaggactggttaatggtgctgactagtctctgtaaaggagaaagaccctcaagaaagaagcattagttgagccaggcaggactggttaatggtgctgactagtctctgtaaaggagaaagaccctcaagaaagaagcattagttgagccaggcaggactggttaatggtgctgactagtctctgtaaaggagaaagaccctcaagaaagaagcattagttgagccaggcaggactggttaatggtgctgactagtctctgtaaaggagaaagaccctcaagaaagaagcattagttgagccaggcaggactggttaatggtgctgactagtctctgtaaaggagaaagaccctcaagaaagaagcattagttgagccaggcaggaccagttggtgttctgggtaagagggttttcagtatggatgtcctgcttgggtcgggttccgtatgaacacatagcctcttggcaataacagcagatcacctttgatggctatgaggtgggtacacggcaggcatgttcctggcttctctctggagcctctagcatcttaggtgttggattgaacggttctctcttctgctgtccagtgtgatgcccacccataggtgagagggcagagagtaactgcacccaaactgagttcagtctcagctcagcatctgtcttctccagctttgcgtatttggccagacatgtctagtattcgtttgagacaggctcaccactgaggatgctggctgctagcgtgttacccgacatgtgtagccttacctggattcctttctccagcaatagtgctgagaatgccctttagcaaagctgctggtgccacagaccataatattccctttaaaactggagatgccctttaaatattaataaaatcattttcaccatgaaactttatattaaattagtctgaaaaaaatcatactatggctgatgttttaaacaggtctactctcatcttctgatctcagtcttggaccatagactgggacttaactagaggtaaatgctgcctccctgatggatcatttggaattctctcgggcccaaagactagtcgacatttaaaaataggatttctgcatttttttttaatctataatgttttgggggcttcttgttatagcatattttcctgtaatcacttatggctagtgtttatgaacaataattgaaacttacaaagtaagtgaaaaaagccagactgcatacagttgtcaaaatatcttcttttgctaatatcagtattttctttaactttgttatttatttgtttatttttggtgggtgccagggatgaaactgggcgtgctaagcaagcagtccaccacagagctacatttccagactatcaaattagttagaacctttattagcgtatgaatggcataatggcatcttaacttttacaagaaaattgctagattataattagatcctggaatacagggttcaaggaaagaaacttagttctgaaggtcacatttatttatttatttatttatttatttatttatttatttatttatttattgcgacaggatcgcctgcagcctgcaaggcatcagacttgaagtgcagcttagggtagtccttctgcctccccacaactgctggggctcaatcccagggtcctgggcactgacacagaccgaaccaaaccccaacctctctcgttaactttacaattttactatctttgctcccttctgtggtggtttctaatttgtgaatgaaaaccttttaccagggccacctggcccacctcacgctctgctctcgtcctagcagggtaaataaacagggcgtgaacttggtctggattgagagtcttcctgacctgttgttttattctctgccttttagaagagaatgatgaaggcatgtggtgtgttaacaccagtgccctatcggctggctcctcgtacgggtcctgggtcctgatcctttggaacctggttttggctttaagttcagacttaatagaccacttgcagatactctgacaatgatgattggagttcctttgaggagctcaagcctacctcttcttcctaccatcttgctgcctgggcgccatgtctacctggagcatccatctgtcgctgctcagccagcatcaaggaacttgtcatcacttgagccatgtccttgtatcgatggatgttctgagatatcattttctagcgtaatgtgtggagtgcttccttgctctagatttaagagctgcccgcacccctgcccgtttctcgtcacaggaaacccatctcctacatgtacagaggaagcccgcagttcagccttttctccatcacacacccctccccctttataaaatcctggtatgtctccagcagctctttggctttctgtttttaggtcacagagtcccagtgggaacggaccgttggcgcctcccaaaggctgttaatcatgcttttggttacagagacccactaattactgggttccgactgggctcctgacttgagattgtgttggaaaaataggaggctttcgtgactctatgactgtgtcgatttagccgtgtcactcatggggcgggttctgtttgtgttgatattttgcatcttaacttggtggtgtttgcaaggcacgggaaggcaggcgtgcagcgggccctggagtacggactctgtgatgtgttttcgaggcaggaaaattgctgctgctttgcaacccctgctctgcagcaaaggatgcagaacggagtctcacttgttcttttgtggttcgggcgccactagtgtccttctggtcgctctgccctcagtgggccagccttctttgtctgcctaggtgcagcttgggccttcgttcctgagtctgtgttcttggctatgtttcttttgggtgtctccgcagaaacagaattgataaatcataagagttacggtatgtttcctgttttctggagtcatcacagtatcttacccaccaaatagtctaccaacgttctaatccccacattggcagttcctggcttttaacagtatccttcctctaggctgtgaagtgctgtgcagaagcttttcttcagtcaatagatgatgtggtgcctcttggtgccctcagtgatgggagtgagctaggtcccctgaggcagtgggtctccagcagcaagcgctagggaccctgggttcctttattgggagtgtgtggggtttccgtctcctctcgccacattcccttcccgtgcctttttcttttattgccccatgcttgaaatttagatcaaatgcaaactgtatttagatgtattcacggtctctcaacacctttcctgctttcttttgacaggattgccataagaagtctttttcaagcagtaaattaatttaagtggcatgtaccccacctgaattttcttacgagttggcagtttagataaatggatattataatcgctgagcattctggaccaacaggccagggccagcgtgggagacgctacaatagtgataatattctgtcagtctggggcagggaaggagacagcgagaggaaaaatccagggtgtgttttcttatttgtatttataagatgcctgtggggaatcaggaaatgctgtatggcagtttacatggcacatggtgggagataaggccgaaagcatgctgcctcgcaggcccatggaggagatgcagggcaggccggttaatcgacagctgtgtctgacgatacgcccaccatcaccagcaaagattccctccctgcttaaccccaccatttccttgaagaatgcggtctatttttaatgactttattgatttgacgattggtttacaacgagctgtatttattgctggaacgttcggtccccgtcagcactttaatacacataaatctacttttggcaccactttgatagactgtaaaactgcttatatttgcaggaaaatttgttttgccacggtgtgtttatgttagactcggtgtgaatttttccccctccttgaaatcattttatgtcatagcttagctgagaaatagacacactcggggatgctcacatcaggcactgttgaggcaacataaaacaaattgaggagttcacagccaagaggtcacagtttcagtttcacatggaaggttctctgatgctttaatttttactgtggtgtgaagatgtcacagtgtttgcctcacaatttacacacacacacacacacacacacacacacacatatatatatacacacatatactcatatatatatatgtgtgtgtatatactttatatatttactttttaatatttatattatatatattatattatattatattacatatttaccttatcatatatatgtgtgtgtgtatacatatgataaagtaaatacctagtaagtatatcctatgtttactgttataataatctgtatataatttcagtattttgcacacaagagccagtgaaagggggactgtatttcccattattcagtataagtggagttaaaataaattttctatgagacttcctaactttttcatttaaataatgttatatctaattagctttgatgtgttttaatgaatgcaattttgaggtatgaactcactcacacacacacacacacacacacacacacacacacacatatatattatatgccttttccactaaatttcttagtacatattctcttcttcagtgaacagaactataatttttatttagttagtttttgaaattttaatttaattaacgtatttatttccacgtttttaccagtgggacccaggacctcctccatgtccaaacacactaccactgaattttatttttaccttcacgataaaaccagtgataacctagtgattgattatgcttgggttagactaaggcaaatagatgtgatgtgttgataaatcccccaccaagtggatccctatgcggtattacagcctggaacccactggaatccttgtctacctctgagatcgctaactcagatccaaatatacgatgatgtgcaaaggttctgctttaaataggcagcagcatttgtggccccgagtataggtgagcatgcttccagtcctggggcttccctccacagcagatgcccagcagtggctctctctctgcctgaggctctctccacaggaagaaatgaacttgcagagcagtttaagagtcctgagctgtgctcagcagcctttggcaattatcagccaaactggaagtgggtcggtgggttttcagtggaaactgtgttataatgggacatttaatttcaaagagccttgttgataagggaggcacagggaaccaaaattgtcctatgggtttttggtgggctggcaagttgtgtgggtttgtatagcgggaaatcacttccttctgtggagatggtcccagcttctttgtgtgtgtgtgttgaggagagggggcacggtggacggtggttctgagtctggctttgcgagcacagcatccaggtaggtggagtctgctgtccagctctgcatgcatccagatgggaagagaaacgttgccggctgtcgtgttctgggcggacttgcagacgcctctgggcataggagcagctgaatacatggtgaatcatgcagtcgaacagcctgctaagtgagggagaaaagaatatcacgcacagaggtttgatgtctttttatgggagaacaaaggagtttcgattctttcacgttgagtttagcttagccattgtgtggcaaaggaggtttaatgactcattgtttaactaagggcttgccaagtatttgaccattaaatagtctccagtgtgtagagagttctcctctcacagacttcttacttgactgtgattaattggcatcgaattgttatttaattacctctgcagaaatctaagaacagtttgtgttctgattaagttatttgatgtaataacagctcctcagagctgggaaggtcagcacagcctttgggacaactcgccaccaagatggcccaacttctgttgcctggaactcaacagaggatctccaaagtattaaaaaccgagagtcgcaaaagtagcttttacttaaaatatatgcatgtttgacagttgtgaacttacattgtaagtctgcaaagcttacactggaatttgtgagaagctattaattggctcatgttaaacccttgaagcaagaaggcatggagcctgtcccctcctacagcccaaacacttcacagtgatgcccattggcaacattgagctggagaaggccgccagctggatgcattgagggggagaaacatcggggcttaggtgtggttttggcttaggaatggctgacctagtgatgggggatgaaggccgtccttatgagggtagagtttggagtggcgaggcccacaccatagaagggagacacttgaacctggagaccaggcaaggtggaggaatggaaagaggcagatattgaaagaagaaataatgacatcctgaagcatgcgtggcgtttcagaggagagtacgatgctgttgacgaagtcaagaagcctgagagttgagcaacagtagctacctgctttagaaatccttgaagtcttagactcagctagggatactgaggtggggagaagtttaatgctgggactgggagagacctgggggctggggagggtggtggtattttaatagttcagaattctctgtgaggacagggtgatggtttaactaacacatgtccagagctttccctgacaagataagtaagttaaagccattacagtactgtgtcctattgttgctgcaaagcttatctggacttagaagtaacacagtagtccaagaggctgttctttgtaaacactttctttaaatcctaacaaaggtgtatatatttacggttaacagccaagccagcttggcgtgacatctgttggcaattccctggtattaaaatgatgcgctgaagatagaagtgaagagcagatttgggtgttggttgatgaatttccagcacaccttcagttgttttacatagggcgggtagtgggagggcccattgtcttcaagttccatcatgtcctcacgccaaatgttttgctgtcctattttttttttttgaacgttgcgtgcgctcgtgtaagtgttggaaatggaaagagctgattttgcatgtcaggcggcagctaccagtcagggtaatatcagtgagttggacgctgacctttgtggaagtagaattccttggctccaggagtgcttttggcagctgccgccatcttggtgcagtcacgttcttgagacagatgggtattttcaggcctttgtttttgttctcttaatacccatttttatgaacgaattcatgagcatttggccatgaatgatagtcaaggcatgccccgcttggacaagcaagcagtatgttcctgcagcaggagaggtcaaatggttgtcagcttcctgttttctgagcaacagaagttcttagcttcctgcatggttcacagtctaagaatctcctgtatgcaagttatgtttgagcattttccaacacacaggctttgtagcttttcatcagacctgctttattctatagttccagtctgggagagtcttctagagatctgcgcttcctatatcgtacacagttacgtggttatgtgcaacatggttgaaattcattcattgaagtctctctctctctctctctctctctctctctctctctctcacacacacacacacatgcacaaacacgcacacacaccagagtatttctgactgaaatcctcaagatgaactggacgctgcagcagctggtcttttgggtttagctgttgttccttcacagaattcatgcctgattctgcgatagacaattttggggtgcctcatacttccagtctcaataatatttcgtctcttagccttggcactaatagaatttaattagaatttctcttgtgcttggcagaggagccacaagtggccgacttctgaaggtggtaggccttacagccacagaggcagctcagcgtgtgcatcttattggggcgcttttcaaagaatggcattcttttcttatcttgcatctacctgtgaggccaaagagagcagaagaggaggaagcacttcggctgcttcatgtgtttgttgtgttcattcattgttaatctatttactcaaagtgacttaggtcacttaatattgaggtggagttattttaaatcttttacttcaattgctgttagccaagagagccttcccgaaactcttctgaccaggggtgatagttaaagtatttagcacccgacacagctgccattagtcaatcagagaggggcagaggcgtccacagcagatttgctcataaccattcgtgccagagtaatgcctgcccagcctgacacctctctggctccttcttcctagcaggtgtttaatagagcttgcagagctgttctgtaaagcagcagcagcgagtcatagatgtgttgacaagagcacgccttctgaatccccgtaatactgggtgtgggtccagcttggcgacttagtaacttggagttaatttccttgagttatattcttcatctcaacgtctgagctgccttgtctttaaatggggacagtatcattgttatagtgcagtgactgtgtgtgtatgtcctgttttgcagtctctgaccttcagtgtctggtatgtatgtgatggtgctttagaaactaagagtgagcccaaatgaccataagaaagtctgccatcggtcctgcatggtgagggtgcggtgtgaattggcatgggctccatcagtgcatggtgagggtgcagtgtgaattggcatgggctccatcagtgcatggtgagggcgcagtgtgaattggcatgggctccatcagtgcatggtgagggcgcagtgtgaattggcatgggctccatcagtgcatggtgagggtgcagtgtgaattggcatgggctccatcagtgcatggtgagggtgcagtgtgaattggcatgggctccatcagtgcatggtgagggtgcagtgtgaattggcatgggctccatcagtgcatggtgagggcgcagtgtgaattggcatgggctccatcacagagtcagaggtgggggcgatctcttgggccattttctgtagatccctagcatatgtgtctggagctggcttggaggtagacaatgtcctctcatccaagtgtgccccctcccctggctcttccacgcttcctccttacaggcacagctttcgagaaccatggatagaagtcgaaaatgagatatcttccctactgtagggaatttctggtggagtcctctcagtgcttcatcttttcccactgctgttgcatacccaggactgtctccatcttgacatactataggttgtccatgttctctcatccaggcaaacacttgttggcctttgatctttcccgattttgagttctgaaggagccttttccccagcccggattctgtacaaactactctattctttgtcctcctttctgattctcaagtcttctctctgtgaaacgatcaggctggcaccacttgacccctctctggtcctcagtgttaaagtttctgcattgttgcaatgcgtggtgtattgtccatgctttcttgtttctgcggtggtgtgtgtgtgtgtgtgtgtgtgtgtgtgtgtgtgctgccagcaatgtctttattcacacacagtgctcttcccttgacttcagttttcttttctgaaattttcagttacatatgttacaaccacagtctcaaaatgctatttgtgtaggttctttgcaagactgagagagcgcatttatatagcgtctacaataggatactgtaataattttctgtttttattgtatattggtagtctcttattgtgcctaatttataagcttcttggtgccatgggtcagtgtgtgtttgaaacaacacatagaaggtttgatgctagctgtggtttcaggcttctgtccagtaccttgaaatgcacccatccttgctgacagcctgctaccgtggtgccttgtgtctccttcccggtctgcctttcatccttcacaccttcttacggacgcttccatggtctgtatctgctgtggctcagcacccactacctctctgcctgtaagctgcacccagagcctgtcaccccctctccagctcttccagtctgatctggggatgctgtgctgttagactttctagagagcttgaccaccatcctgcctctgtctgtaggttgttgtacccaaacgcagcctgtggtcagaaatattaaatatagtttgctggaacacagatccatttggtggtagcaatgcaaaggaaatggcaggagtaaccagcttgatgctatgtatgacaacattcccaaccaagaacaactgtcaaggaagatgacaggaaacatgcagaattggaaacagagacctgaaattggcaaacaaaccatttgctgtttgtagcagcagggctttctgtatatatatatatttttttttgtgcacaggaagtatttgtgcacttccagcatgttagccattggtttggacagcaacggagtttcacggaacaaacctaacaaaaagtccacccctctttttgacttatgtgaataataatgaaaagaatccaaagcctttggcttccaagaaactccgaagagaattgtaaggaccaacattgcatgaaggtgatctgagatagaagagatattcttggactaaggccttggcagatggagcccaggcaggattgagacacttctggaaaacatggataaagaacagaggttcagatcagagtgagggtagccaggaggctacctggcatctctgtcttccttctccagtgttcctaaaagtccaatagaactgatatagtaattgagatgcagattaggcaatttcaaatgaaaaacgaagacaggctggtgattatgagaaatcaagataagacaaacgagcctttcatattttcgtactagtgtttgggcaccggtcctaggacagggttcaagaagttgggtgggggtggtcatggatcggtttcaaaggtctatgtttggtcttgccttgttgagtttgaaatgctctgtgaaataaccacgtgttttgagtaaggccaggaagaactgagtaggtaagatttgggatacccaagaaacaggaaacagaaagttaaaaaaaaagaaaaaggaaaaaaaagaaaaagttcggggtgggggaggagacagagagagacacacacacagaggaagaacaaaccagaaaaatgagcacactcgttaagtagctctgtccttggataaagggccagctgaaagaagctatctatcttgaagaacgaggttggtcatgtttctctctactatggcataagatgtccccagaagtctgagcaggtggcccccagccccattgggaagcgctgcagccccttcagcaaggatgactggtccttgtctcctctaacatgagcagtttggtcatagcctgcagacctctttggaaatctctacatgagtgtccaatagataggggaggcctactaagtagaagacaggcagttttaggagattatgggcagaggaggagaagaacctgtgtgtccccattctcatggcctttggtttcacatcattgactgtcactgtgctggtggcctgtttcgacagaaaatgagccagagcggaggacctccagaggagaggacctctccacagctcctgttctgttctcacaccgggttggctgaattttgttttagagagtctaggctgacccacccataaaatggcttccttgtcacccatgagcacagctgtcctggttgccctaatgactcagctgggttctgctcagcgctctctgccttggactgtcatttgcctagccaggagtcattgtacctagaagagtgtcatccatcttgtctgtgctgtgacagatcactctggaggatacgtcgatttagatgccacacctcatgaggccggttcatttgattattcccctctttctccagtctctcggccgtcggctacaggcccataggggaccactctcacttggtgcccagcctgagtgtggcacttctgcctccaatcttttctgctctctgtaggctaccaaccaaacagtccacacacactccacccacccccagtgtgatgtgctagcagtgggactcagggcctcacacgtgccgtggcacagatatcttcttacgatcaagtcaccgagctgttactcgcaaggtcaagtatggtatgaatgagtggtacctaagactgtttgtgtggcagagaagatggcttagaggggaaatgcttaataaataaagtgtgcgtcagggctgaacctcagaagtatcagatttaaaaaaaaaaaaaacaggatataaaagtcaacatagtaattgattatatttatttgagaggtactgtaaaaagacatataaaacagaagggtacgttcatggtgacctgaggctggggattattgtaaatggcaggagacattggggagggggtggtgatgagggaataaaaccattaaacttactttgtgtgaaattacattatttagtaagggtactaagatacactgaattacaaaaaatatacttctgtaaaaaaaaatcagtgttttgatatagaaaaataaaaataatgcctttaaaaaacgagattataaagcagggaggggctgtcctgggtgggcaagtgtttcctgtagcagcatcaggacccacgtggatctccagcaccttcataaaaagcccgatgtggccctggacccctgaaatgctcggagaaaggaagataagtaaggcttgctgaccgcttagtctagatgaattgacatagtctagacttagtgagcgaatctaactcaaaaagtaaggtgaagggtgagaaaggggaacattcatctttacctctgacttccacacatgtatgcacgcttgcacacacacacacacacacacacacacattcacagacactaacatacattcacacatacagacacgctaatgcacacatcattaacacacatacacactaacatacacattaacatacctatacacacatatatacacattcacacattcatacacatattcacatactaacacacacattcacacacacagagattccagctagatgtcggtacttcatataactataagaggaatctgactaagcaagaagtcaggagtctaacaactgtggcagtaataccagaatatattctacaataagttcctaaagtttagtccctcatagctttgtgttttgaaaagaagtttgatgactgtgtctgtgaaattttctctggacagagacagagaagcagagccacttgcaaggacccagtgtgacaatgtggacttcaaggcagcccgcctgtcccagtttctcatactctgtccttgccatgtttcctttcttacaaagcatgtgagctgggaaagtattcagaacaggttagagtctccttgtagataattatttggttcccagacagtgttgcactggccacatctggcttgtggagctggggtagttcctagggatagaatttgtgggtttgaaagggttaaactctcaaagttgtttgtttcccctcggtccgtctgtgcagtatagtgttagggtaataagggatttttctttctttttagatttacatttattccttgtccatagtaatctttcataaaaacaatttcttccaagtgttgcatgtcctttgagagtcactattcagtgtctctgtttctgtctccctctcctctcttcctggtcccccttttccgatccctcttctgtgtttgtgtctcccacgtatggcttttataaatatgtatggacattctaggattctccaatgagggaaaaacatgctgcattcgtctgagtctggcttgctttacataatgtgataattcccagttgtttctgtttcccagcaaactttaacatcgctcttctttatggctgacggaggctccgtctgtgtaataccatcttctttaatcattcatgggttgatgaccacctgggctgattttgtattttatattttggcttttgtgaatgctgaggccagagtcatgggtatgcaggtatctgaagtgttgaggcagtgtctttggttgtattatgtaggagtggtgccttaggtcacatgggaaggctggttttggttttaagaggcacctccatgctgattttcataatagcgaaatcagtttatattcctgccagcaatgcataatgctgtcttcccagtatctgacaccttaaccagcgttttctcctgatgataagtctgagtagaacctcaatgtattctaattttcattttctctgcagctgaacagtttggactttttcatgttttctggccatttgtatttcgtaatttaacaaccatctattatattgtcttattggtgctttactgttacttcttgtgtattgtacatgtttatgtgtgtgtgcacatgtgcacaggtgtgcgtgtattgcatacatgtgtgtggatgccagaggtcaatgctgtttgtcatcatcattattattttattattattaattatttgagacaaggtctctgacttagcttgaagctcgtcaattcagctagcttggctggtgagtgagccccatcagtcctcttttctttgctccctagtgctgataagcacttgctgttgagcctgtatttttatgagatctggggaccttaggtctgagctcaggtcctcacgcttgcatggaagagcactttaccggaagaaccgtctcctcacctcctggctgtttgatgggcttgtttgcttcttttggtatttgggggttttgttgttgttttttttagttatttatatattctagatgttaatcctctgtcctaacatactttagagcagtgggtcccaaccttcctaacgctgcaaccctttaatacagttcctcgtgctgtggtgacccccaactatgaaacttttcatcgctacttcctaactgcagttttgctgctgttacgaatcatagtgtaaatacctcgtgtgcaggatccctgacgtgcgaccaccaagagggtcaggatccacaggttgagaaccattgctttagcacagcgtggtaccgggaagagcggatatccacatataaatgaaggagcagtcctggtctccacttttcgtgaaaacaaacaaacaaacaaaaaaaacccaacaacaacaaaaaaaacacttcagaagacttcatccaggctcaaatctgataaaagaaggggagggcttggcttctagatgtaggcacagctacaggctctctggaaaacaactgctgtgtctcaggaaacaacacaagaattgacaaataggattgcacagcgaaggaaatcaatactcaccagaaaggaagaaaattgttgacccagattcttttgtttgtttgtttgtttgtttttaaaatatgttatggtatctggcctctagctctgggcaaggtgaatatgaagaacctggggctctgcttcacacagagccttgcaagcaatccctaggggtcagctttgagtcctgttcactggctctacaagagaccgggccatctcagtgcgtgcagagaccgtggtggagggaggacccaggtatccgagagatgcccgtagcattaacaggttccttgtgagaagtctggacaggctgtgactaggtgtgtgtgtgcgggggaggggggctgtcatggcaagtgagcttagcggttctgagggcagaaaagacacagtagcctttgggtgttctagaaggcaagattcagcttaacgtccgccaaatgctctaatggagcagtttgcttggactgggttcccccgggaaacttgctcccctccccgctcgcctcccctgagacattcctgtggggaccacatgtcatcgggatgaagaggcagagtatggggggactcatcataaggatttgatttggagacttctgagcaagtgactctgaggcctcgagctctgcctcacagacccgaattcaacattgactgtaaggcagaaacatctcccgcaagcactgtttcttctctcacgagtttcttaaaagttaccctgagcccctcttgtctcatgttttctgtggacactggtggataagagtgagggctatgggggaatctttgacacgtagttttgtggtacctgttgtgagtgtctgtgtgcacagcggcggatagaacaagacctctggcgtcttcctgttccactcttggcgttattgccttgagatgtggtctctcactgaaccagaacattgcaggttgggcccggctggcccaagcttctgggatctctcctctaagacatacctagctttctagttgggtatcagggattccagctcaggccctttggaagctggatgaagatggctttttcttagtgtttttctcagacctgaagattcttgaatccagtaaaacgtaaaggagtggtttgggggctggagagatggctcaggggttaagagcactgactgctcttccagaggtcctgagttcaatccccagcaatcacatggtggcttacaaccatctgtaacggggatccaataccctgttctggtctgtctgaagtcagctacagggtaatcatataaataaaataaataaatccttaaaggaaaaaggagtgcttttcacataagaatcacctctagtaagccatttcatcaacactgcttttaaagctgaatcgggtatccgttatgtctggatcttgcccatgtttaaaggtgtaactctccccctcgtttttaccatgtatttagtgatttgagttcactttggtttgtgtgtctttaagatggggtctctcactgaaccagaacattgcagtttagcctaggctgtctgtctggccccctcagacactcctggctttctgcctgggtaccagggattctactccaggaccttacacttgccgagctaatgctcttacccactgacctgtagttttcttcattggtattgtttctttgtgaacttaagaattagttcatacaacccatagactatataggggaaatttgactatgtgtagttttctcagctgtatctgatttgagctagtcaatctctctcccctccaggcctggtctagggaagagtagacagggcatccttgggaattcttgggcacttagacttaagttagactccgcccgcagctgttggaccagaatccacagtttaatagctgaacatcctctccctctggtatgcttcagagtctggctaacagttactatctcagcttttggggtttttttgttttgttttgttttgttttgttttgttttttgagctcttgttaaaaagtgcctggcatcctgacaggattccttcgtacaatgggctcatttaaccctcaggatgaggctctaaaggaggtgttagtaaaacttaagaagagttgtcgatgagcctgccaaagatgtcatgaaagacactttttggagtctgcatgtcctgagctggagacaggacagctgaggcctgcttgtctccggtatgcacacccgtgtgctttctggtagaacctaggtgccctggaaggattacatttgtaccatgggctaccaaagcatcagccagaaaattgctcagggagttgcccgcctcaaagtagactatctatctatctatctatctatctatctatctacctacctatgaatatatgtatgtatcatccatcatcaatctgtcttatctatcatctatctatctatctatctatctcttatctgtctctgtaaaacacgtttgctagaaaccagttttgactggtcccctctgaagccttcagcactccccgttttcttgggctcatcttcaagggcagtgcagtgggtggtagtgactgaccttggttgtggatcactgcttctgtttccctgtctgcttccctcttgtctccccttcctgctcaagcctgtggctgtcagcctggacacccatgtgacaggaatgtcatggacactggtgggagtgttctcctcagtgggcagcgtcttgagtttcccagggtctgatgaaccatctctaagggtagaacactggtactgtcatgtacatctagaaaaattaattgttaagattaaagaaaaatttacatggcaattagaattcattaaactttgtgtttggccattttccgtctttcttctttgtacttggattgacctagatgagacctaaaagtcaagggacatgcttaaaccgacccaactctgtcatgggcttttcccatttcctctgtgtgtgtgtgtgtgtgtgtgtgtgtgtatacatataaatatgtatgttttaaaatgagggccacattgcagttctctgtccggcatcattcagtagtatttttattttctttaggtatcactctgtgttctttctttccgttgccattgacatgggcttattttgtatgaatgcatgatatattaaacacatatgcatttaaaatattgtttcggtttgtttgcaagttatctctctccggggtctgtctggagagatgcgtaatttcttgcgttctgtgcttgcagggaggattttaaatcgtttctccaaagacatcggacacatggatgacttgctccccctgacgttcctggacttcatccaggtacgtcacgcactcagatgcagaacggtgcctttttctttcattccctttctgcttttcaaggcctttccgtgagcgtttggggtggccatgggctgggggtgcgtgatgttacctcaacaaaaggccgtgtttgtagaagaaaggtgtggctatgttttggaggctaacttagcgtgagtaatgttctgtgtaggagtggccgtgcgtttgtgtcagggttggttcacggcagctacacgctggtaagtggcgtcccatctgcctcccaggtatctggcacggattcgacttactgtgaacacatttcataatacagaaacaatcacctctcacggaaagatagcccagattaacaaaattatgcattgtattgccacaaagggcaaatatttactgcactgttgttttgttttgttttgttttgtttttgaagggggtggggtaaaaccaggtgtggttacttacaaagaacagattagcaataataaggtgaaaataatactttgttagcaaggacaatagagactgcttattgcagattcagagctttaaatgcaggcgtgtttaagccaataataggagtacgggatcaaactcttgtcagaaaatgtctgtttttgtttttttggcagcctttcttttcacacgttgattgctctgtcttaaggtgtcttttgaaaacaggatcccacagaaacgcctgcttttagcatgttgtttttgtctgtgaacttgagggccaagggaatcatgttgggtcacctgtctctcatctcctccttcagtgttggtgctcctgcggtttgatttgttttgttttgctttcttctctcatttaattctgtctacttttcagtgactcaggcaggggatcttttttgtttcccccctgagcgtttattttggagaagaaatgcatctctcaaaagctgtgcgggttttagaatcccagaggcctgaggctcacttaccgtgagattgaagccctttccctcctaaccaccggtttctccccggaagccaagctgcaggccggaagtgcaatgggcacaggggattcagttgtgcccgagtctcgcaggacccctggggtccacagttgagccggaatccctgttagtcacacaggaagggagcccaggctgtctgactgcaaacggcatgacccataggtgaagacctctcctccttacacccacccagggcccacaggcggagtctgcaccgcagatgagcgctccagactcttttggttctgcgaacttatttttaaaatgtttcccactggctttggctacgctcttatcctccggaagcaaccttttgctgcagagccctcccgccccgtggaagacagataacattaagcccatgttttgacagcgattattaattacttctagaagaattagcacaagggctctctccacagcagcgagccaggccgaggctgagtttcccaagccggccggcccgccgccgtgcgtttagcagagtgtgatccctgctaattagaatcccttatgtgttttcctagcgcctatggaggggcgatacttgacgggtgctccttgatttcagtacaaagcattctccgcattgtgaggagagaaaattctagcctcgtacttcagtttaaccagatcccagggtctttattcatcccccacccaaacactcttggcacacttagccgccgttgactacctctggttccgggtagccggtttctagaatcctagaagaggttcatcttgacgctcgctgttgcccctccccagaaggagttttacgtgaaggatagctcacttatcaagcacggttcagctctgttgtcgatcacctcgtttgcaggtgtctttaataagccttcccataatcctttcaggaagaaatattttctccttttaaaaatagtattagctaaatataaaagcactgatctcctgccattgtcgtggggttctctgagggacatttcccaacattcgttgtttaaatggttgtcaagaggaatcaagtgaaacttagtaaacagagccgctccctcggactgtgtgcgcagccttggctgtggcagatttgcatctgatggctgagtgggcttctcactgaggaatcgctggcatggttttgaagtatttggtgcctgttgctttatgacagagcaaagattttctttcttttttttttttttatgagaggcacacacacacaaaaatgaatttaacctgcccttaaagaaaggccaacaaaaaaatttaaatgtaattcctccccccttccccctttttaaagtaggctagggctctgtcaggacaaaaacaacccagtggtgttctgagactcttaatggaatcatgtaaacttaaaataaacactattatggtaagcacatagaatgaaaactaattttccaaatcaaatacattatattcaattcattttccccaatcaaccaaatgtttaaaacctgttagttataacagcaatctcctggaaattaattagaagcctattagctctgctagctcaggcggacggcagggcttgctccttacatgaataagtagtctctggaattaaagtgtagcaaggtcacagtgactgtcccatgggctcacctagtgcacggacttagtacttgatattttttggtgtgtgtcggggggggggggcgagtttggcagggggtgctttgcttttcaaaaaattttgtctactctaatttggtcttttaatacattgaaaaaaaaacatttggactaaaaatgtagctcttctgaccttatctcatttctaagaccgtggttctattcccagtaccactaaaacaaacaaacaaacaggcagacagtcaaacaaaagggccaatgatagtaacgacagaaatgtgagaattagccatcagataaaaccattcaggtcacgagaccctgctgtcattagcagcaccagctttctagtgtggatctctgaagtgggtggaattcttcccagtccctgtttactagtgcatgctccctgaagggttttcttagctcctttcaagactgaccttagtagcaaacttcctgtctgcctttgctcataatgccatcagcaaaccctgctgctgacatcaggaagtcaccagccagctcctactatgtgcagggaatttcccaggatgcttggctcagcttgtctggaccagttaagtgcagctggatccgatcctcagggaagcgagcattcatcctgcatctccatcgaacatggcagcgtgcagaccagcaggcagagcagaaaccagagctcacagctgaagtggtagaaagcaaaagacaaagacttctgggctcctggttctttctataaaagccgtgcttatgggcatgcttttctggataaggaagattggatggctgtagaaggaaacaatgtaatcacagttacccccatgagctgtttaatccagagcatgcatgcctgcttcatcgccttttctgaaaggcgaaggcagtttagttagttttgtaagtcagtccagaacttgagtatgtaattctgaggaattgaggggattgggccgaggacaggacccttcatttgtggcattgtacctagagcccctatgttctgagtcgggacaaaagttgggacagaggtctgtcaagataccagtgggatgaaggaagttttgtttaaaatgtggacaaatgtcctgccacatagaagtctaattttgtcccttaggcttcaacaaaaggttgatatttctgtgaacatggatggggtatgttttaaagtactaactgttggtgttggtggtaacggggcacaatgcagtgacagttttcaaagtcctcatcgttgattgctgttgtgaatcactgtgagaggttctcatggaacagggtaagaagagtctgggagactgggcctcggtgggcatgagtggatcgttagtgactaaagatagattactgacaggctgctgcaaggggtggaacagcactgaagggtgttctgaataaaatataaatatatgactggaaataataacataaaatgccaagttatattggagttgccggtggctcacattatacctctggcttaaaaagtgttgttgttctaatgtgttttgtttcttggccttttcaagaattgcaagcactgagagagagagagagagagagagagagagagagagagagagagagaatggctgtatatattagtatatgtatgcatatgttatatacatgtgtacataaggattgaggaagatgcccaacactaacctctcatcttcacacacaagcgcacataggtatatacacacctgcacacatgttcagttgaggctgtccaaagttcatcatagctcattaagtgaagcctaccctgcagttttagggaatataaagatgtgtcatgtttacatttctctgctctgaagacactgtcattctgggctcatgggcttttctcctcctaagacacaggaccgctgatctggtttgcacacatgatgtgcttgctttccatgcttgctttctctgcaaacctgaagaaatctcagcagataaaaattcccttatgctgcactgatgttctcttaagggatacatcactacctgaaggatgtggctgggcaggcctggatgctgtgatgcagtgagggatgggcaggccaggatgctgaatgcagtgaggaatgggcaggccaggatgctgtgatgcagtgaggggtgcagcaggccaggatgctgtgatacagtgagggatgcagcagcccaggatgctgtgatgcagtgagggatgggcaggccaggatgctgtgatacagtgagggatgggcagcccaggatgctgtgatgcagtgggggatgcagcagtccaggatgctgtgatacagtgagggatgcagcagcccaggatgctgtgatgcagtgggggatgcagtaggccaggatactgtgatacagtgagggatgcagcaggctaggatgctgtgatgcagtgagggatgggcaggcctggatgctgatagcagtgagggatgcagcagcccaggatgctgtgatgcagtgagggatgcagcaggccaggatgctgtgatacagtgagggatgggcagcccaggatgctgtgatgcagtgagggatgggcaggcctggatgctaaatgcagtgagggatgggcaggcctggatgctatgatgcagtgagggatgcagcaggccaggatgctgtgatgcagtgagggatgggcaggccaggatgctgaatgcagtgagggatgggcaggcctggatgctgaatgcagtgagggatgcagcaggccaggatgctgtgatacagtgagggatgcagcaggccaggatgctgtgatacagtgagggatgcagcaggctaggatgctgtgatgcagtgagggatgcagcaggccaggatgctgtgatacagtgagggatacagcaggctagagtgctgttatgcagtgagggatgggcaggcctggatgctgaatgcagtgagggatgggcagcccaggatgctgtgatgcagtgagggatgggcagcccaggatgctgtgatgcagtgggggatgcagcaggccaggatgctgtgatacagtgagggatacagcaggctagagtgctgtgatgcagtgagggatgggcaggcctggatgctgaatgcagtgagggatgggcagcccaggatgctgtgatgcagtgagggatgcagcaagccaggatgctgtgatacagtgagggatgggcagcccaggatgctgtgatgcagtgggggatgaagcagtccaggatgctgtgatacagtgagggatgcagcaggctaggatgctgtgatacagtgagggatgggcaggcctggatgctgaatgcagtgagggatgggcagcccaggatgctgtgatgtagtgagggatgggtaggccaggatgctgtgatgcagtgggggatgcagcaggccaggatgcagtgatgcagtgagggatgcagcaggccaggatgctgtgatgcagtgagggatgcagcaggcaagatgctgtgatgcagtgagggatgcagcagtctaggatgctgtgatgcagtgaggaatgcagcaggccaggatgctgtgatgcagtgagggatgggcagcccaggatgctgtgatgcagtgagggatgcagcaggccaggatgctgtgatgcagtgagggatgggcagacctggatgctgtgatgcagtgagggatgggcagacctggatgctgtgatgcagtgagggatgcagcaggccaggatactgtgatgcacagtgagggatgcagcagactaggatgctgtgatgcagtgaggaatctcctgagttcattgttctcttatcccatttccattcagtatcctacagtgccctggcctctgggtctgtgcaccatccctgtgcacagaagtggtctgatggtgtctgagcagtgcattttactctgagagactcatgactttcagagttgtggataaggtgaggatgaacagtggtgtcactaacagaaccttctacccctttgagtgaagccattaatttgggaaccctgagggctgaatgtggcctagctggtctgctcctgcttgactggtacattgtgtttgccctcctgtctcttaaaagcacaccatttgcaaagctagtaagtggtctgccctccgttgctggcgctctgccccatagtcaccgcatgcatcctactaaattttctcaggatgcttgtcattgtaacttaatgatgacattcttaccaacaaaactgataccatataacaaggagcttgataggctgaaagctttgaaatgactcactaaccacttctcttaagactaggtgccgtggtgcacacatatagccccagccagcactgggaggctgaggaggctgtcctgaccacctagccagagttggatcccaaccccccccccaaaatactcagttaaatgctcttctccccccacccttggtagtaaattaggtttccgtgctgtctttgttactaggttactgcagtgaagaaatacatgaccaaggcagcttatagaagaaagcatgtaactagggacttgcttacagctttagagagtcagtttatgaccagcatgacagaccagagcagggagcagggcagcaggcaggcatggggctagagcagtagctgaaagctcacatctgatctgaaagttggagggagagagacagaaagacagagagcctgggcctggcgtgggactttgaaacagcaaaccctcatgtttccaacaaatgtcttatcgtctgtcctaaacagttcaccaactgggaaccaaacattccaatatatgagcctatggaggccattctcacttaaaccaccacaggtctgaagagtaggtgggggaggggatgtcctggaggaatacacggagaccctccttcccagtgtcttgagagttgttgaagactcgttatttataagacttttcaggaggaagaagcaggtatagctcaatgaatccaaggcttgctctaggttgtaagttctacattgtacatgttttaaaattaagactaagctgcagggaattatttccgacctgccttacattcgtaggtcatagctttcaggattctattgcatcctgcctggaggaactggacaaagttttgtgggggatagtctctgaaccctaggaagtagagaaggcacacttgtcaagactcccagggtgtgtgatgtttgtaatgagactatgttgtggaataataatagcacaaggtgttgagacaaggcttcagacaagacaaaggcagtggggacagatcctggagagacggtgtcctgagaaccagcccttaacgttgtagtagttggtaggatacggagaagagggcaccgaaagcagaggactggcccagcacagaggcagagggtcagtgatttaaacacggagcatctatgtaagaatgcgatggttaagacaaatcctgactctcactctgtggtgcagaacggttcatccctcagggatgcgtccatcacaagccatttctgttttaggcagtaggttctcaggtatcccaggacggccttgaactcactacatagcgaaggatgaccttgcactctgatcctcttgtcttcccaagttctgggatgaggaggcctatgcctccatgcccaatttacatggtgttgggagttgaacctagagctttgcatgtgctagaccagctctaccaccggaactacttccttaccccataggtaaccctgaaggccaccagatgtggctgtttcattacatcgtaggagctggagaaactgagctgccctccgctctagatgaggacagactgtttaaaaagctaatgtgtggattctctcctgtgtcttcctacctgaggtcacagagcccttaaaaaatcacttcagtccgtgctcttgcttcttcaggaaaagccttaagtttacgtgctgtggagtgactgtgtgtgacagagtggcacttaaagcataagggtcacatgtcatgtgtgatagcattggggagtctggcaaccttcctttctaattcactaagccttaccactgaccctctctatcctcacagagctacattctgtgcatgctcacagagctacattctgtgcatgctcacagagctacattctgtgcatgcttacagagctacgttccagacattgctgacagagatacatagtatagagcggtaaagatggaagaaaagcgcctacctcatatggagtgcaggagagagggttgccagcgtgccagcaaaattctcttccttcagtttagttttgttttagaagtaagattctgatacattgtataggctgtctcggaattcttgggctcaaataacctttctacctcattttctcaagcagatagagttgcggatagagtgataggtctttggctgaacacccccgggaccctgtcccctacacggcccactgccccccccccccccagatctggggatctaatccagagctgggcacctgccccaccactgagccacaccccctcccctcagtgacactccagcaaaactcatttaagtaacaaaggatatgcttcttttaaaatataatattatctctaagcgagacaaataaattggtaacagtgatcatcgtctgctctcttgtgttccattgaggtaactgtctgacacagaccagacccaagtcccagctcgtgagcttgtatggaagatgttgggtttgtgagtgcttatcattttagtggctatttcccattctgtgccacatgatcagggtctgttgttttcagaacagatcattgagcagtaaatatttcatactaatgtaatctctggactattcccaaagcttccgtggtccccagtagcatcgagcaaagtgtctcacttatctggaattctggcagctaacatgcccacttccgaacaaagcaattgaaaatgtagtgacttgtcattatttagtggggttgaggggggagtgtacttctgagtgtgcaaacttgcacacagctgcgttctgcaaaacgctgccaatgatttagagcttcgttgcaaagccattcttcttcacttcacatcctcatcagaaagaaagagagagagagagagagagagagagagagagagagaaagaaagaaagaaagaaagaaagaaagaaagaaagaaagaaagaaagagaaaaagaaagaaagagagaaagggagaaagggagaaagggagaaaaaagagaaaaagaaagcaggccaacaacttgactgagcttaaataactgacttttcctaccctttcatggcacacaaaggactaatcctaaggctactctagccaccagtgcgggcagtagtggagactaccactgaacacagacacattgacttctgctttatgaagtgaaaatgccaagccaaaggacgcgaaggagccgtccccagtcccttcttcctgggggtgcaggatgagcaaaagctactgcatctggatatggggaacaaagccagcctaggacttggggataataggctgggtcactggcttttatagaagcccaggggtggaactgcccggacttgtctggtcccactgacccttgcacggctttgtgtggagatgtcaggggaagtgtgtagaaagcacccaggacaatgacttcgtcattctgagatttctatggtttgctcggcctactcccaccttccaattcctctcagacaaaggacggtgttaggtaggttgcctcaccctggttttcaaagatctcattctttaaaagtaaactcatccattttttaaccgaatcagagtgtttttcatgcttttggaaatcaacaaaagaggttttacttggtgcatttgcaaggagggaataattaatcacctggaaatgccagcctcagagatagcactgtgccagctgcctgactgaggtgtgccccctgatcgtagacagtcgagctgacgatagcagatactggcaatattgaccaacacataacccaggcagcccatgtgattggttggtatcgttcatgaggccccctgactactattcctggaagaggagaagtttgggatttttgccagtcagagagttagcaccacacttggtagtgtggtgacagtcactggggattctcccaggcttgtaggcaatttgtcccagcatgtgtgctctggcgataatggttgtagtttagcaagaaggcaatgaagacgtaaagagcaaaaaaacaaaacaaaacaaaacaaaacaaaacaaaaaacaaaaacaaacaacaacaacaaaagtgaacaattttgttttttaaatcaagcctggtggtgttctacaggagcacaaaactttataagctaacatggctgggtggtgtgtgtggtcaaagaatagaggtcttcactgtgcctccgcacccccacccccgtgggctctcccaccgtcagccatcctacacagttgttaaggcagagagtaaagtggtggagacttctagagttccattatctcgctgttcttgcttgtatccatttttgtccgtgttctggtgttctggttgcttcaattttattaaaatcgcacacttcctattttatgttttttttttttttttaagatttatgtatgagtacactgtggctctcttcagacacaccagaagagggcatcggatcccattatgaatggttgggaaccaccatgtgggtgctgggaattgaactcaggacctctggaagagcagtcagtgctcttaaccactgagccatctctccagcccaggattttgttgtcgttgttgtttgtctacacttattgcatgtgtgtgcaggagcatgcttgtgaaaatcagctctctcttctgccatgtaggttccggagaagaaatggaggttttcaggctcggcagcacacgctgcaccccattagctgtctcgctggcctgagcactttgctttgtacatacactgtgtctttctaatcccatctggatcatggttcatcatcatcagtcctgtcctggagtctctcctgtttctgaatttcacaacccacttgttcctccaagccgtttctctggctcctgatgggggattcgctgagggtctgaatccagcctagaagtagacggtacggcctctaccttgtggtgcagggttcagaccccctgagagaggtcacccaggccttgggagctatgtgtgttctgagacacatttccagtcttctagtcacatctagaaatgatgtctagtcttcacatgggtcctcttccctcctctagaagcacccagtataaatccttcttgacactgtgactctataaaattttcagcacatgcctgcacataggtgggagtggaaccctggtgacatagttttctgtggttgaattcctttgattatttaggtctcattccatgagtgtttcagtgatgaattttgtccatttattctccatctacccctccgcattccttcattctcccaccaccgccaccgagagatgacgctgtattggaagatagcatattttattcatctgttggttgatggatatttggattgttgtcgcgttttgtgaccaaccctccttgtatcagtatttatgtgccacgtatattttcattcccttgagatgaaaatgccttgggtgggatttctgtgcttcgggtaggtgtatgtttactaagaaaaaaagaaaacctaccaaaaagttttcacagtgccattctactcacacatcgcatgcacagtgactgggggcgctctgcctttggtaacgcatggggcttagtgttaccagttctcttgatcggagcctttactgtaggtatggctggtctcgctatggttttagcttgggtttccctgatgattagcgatgctgcacctttttttttttttggtgcacatttatcagccactcggaacttttctgtgtgtgtgtgtgtgaattttttggttcaaatctcttgcttattctttgtaaatttattcttaaaaatcttgttacaggttgatttattggaatgcgtgtatgtttaattctaataatttctcccctcaccccccacccccgagtttgtgattttcttttctttgtttttttaacagtatcttttggccagtaggctctaactttgatggagtctaataatgacctttttttcttttgtgtatttcacagttatttttgtgtgtcctaagccgtatggaggtacttcatttttttattggtgtgcttatgtctgtacacacatacatgtgcgcgtatgattgaagatggagtccagtgtcgacgcttctttctcagtcactgcccacccttctttctggcatatgtgtttatgtgtaggatgtatgtgtatgtattcgaatgtgggcacatgagtgtacgtgtgtgcatatatgtatgcacgtgcctctggataccagaggctgatgtcatgtcttctttgactactgtcttccttacacgtaccggcagggtctattcattgaacccaaagctgacctcttgagccggtctagcctccaacaggttagaaatccaggcccatcaccaggccctcctggcattgatgcaagcattgaaagggtagccctgacgtggcgcagcatactctttagtcactgagccatctcctcagccctccatcttgtctttactctcagtgagtctagagctttccaattcggctagactgactggccagcgatctctcagcagccccctgtctcttcctccctggcacggggagctgttacgtgcacactgctatggtcacctttttatgctgcttctgggacactgaactccctcttcacacagcgtggcaggtgattcacctcttgagatatctgttcacctttctttggtttttccagagaacgtctcgatgcgtggccctgcttggcctggaacttgctatgcagactaaggggctggggttgtgaccgagtcccgctaccccagcgataccctgctcaatctttgtccacattttcaaaggcctcgtgtgttttcacgtactttgggtgtatggaaggagtgcttgctgtttgaggcttctctctcctttaatttccccccctgtgtgcattcacggtcttgatgtcttggctgcctgcatgtgggctccggttgcctgtgtccttccgcacacgatctctctattctttcacggatactacagtggcttggctattgttcattttagaaagacttggagcccagtagcagtttgatccttcccactttgtctctcctctgttaaatctcttttatttaagttctaaattcaccttacctttttgttgttgttgttgtttttataaaagccttacttgttttggttaatattgtccttaattgttcttaccctcaatgtagaaggtcattggtatatctgtggttaactcaactttatatctgttgttcaacaaagatttggggctctcctttgcagctcttgtgatattttgtaaacatttggtgttagagttatactgacctcatgaaaataaaagagttggcaagggatttctgtctgtggtagttagtgttatgtgtcaacttggtcagattaaggttcccaacccaaatagtttactcaaacagaaaccaaggtgttgattgaaaggtattttgaaaatgtgattactggtttataattggttggcttcaagtaagtgaggtcatatcaggtcgtgtggattaaaaggtcttaagagcagaggcagaagaaactatggctgcggctgacagctttccccgcctttcagatcctgaacttgcctcacctgccctgagtcacaggggccaatgaatgatgatcaccaccagtgatcttctcaaaatgtttgtcttgagctatttgtatttctctacagtcctcttccttttcttttgcagggggttgggaggtttgaaacaggatctcactgtgtgactgtggctgacctgaattccctgtgtagaccagactggcttccaacccacagacacccacctgcctcagcctcggagtgctggtattaaagcaatgcacctccacacccagctgtcagtcctcttttctaaaagaaaaccaaaacttttctaggattggcatttttttttctctcctaagtatttcatagaatttactagtgaagtgctatcacccaagagtggagcactagagtccaagagtggaggactatagcccaaagtggaacagtatagcttaagagtggagcaccataatacaagagcggagtaccatagtttaagagtggagcacttataagccaagaactttgacgagtcactaaattcctttcagactatgaattctgattctcaaacagacattgagctgctccggttgctatttcttgtaatataacctttcgccaccatttctcaagacataagctgtctcatcaaacatgttaactctgtgtgtctagtcagcccttttgatgcccatcttgcctcttgtgatgggggcaattctcctttcttcactggcctttgaagcttactaatttggtagtgttttgaaagacccacagtttgttgtttttctatctaattaatatttttttttcattctcttttatgctgtcctttttatggcctctcattatatagccttgattggcctggagctccctgtgtagatgaagctggcctcagacttacagcaatccttctgtctctgccttccaggtaatgtctttaccggcctgagctagtgtggctgcttcgtttcttttctttttttttcttttttcccttttggttgttatttctgcttatttgttctcatatcctcctttaaactctctttatgcttatgtgtatgagtatcttgtctacacatgtatgtgcaccaaaaaatgtgctcgatgcatgaagcagccagaagcgagtgccagatgccccggagctggggcaatggatggccatgagctaccatgtgggtggtgggattggacccttgtcctctgaaagcagtgagttctcttaaccactgagccctctctccactctctttttgcatcctaaaatctggttttagacctttgacacttagacttttctgttttaaaaagttaaagctgtacatacatttacctctaaacatggcattagctgcaactcccaagttttgatagtatctggttttcatactttttttttttttacaaaacacttccattttaatgtgtttttgtaaacccagtattatttagatctgtatagtggaattcctgatagccatttttctagttttcttgtttttgtgatgtcgttaaatccgctaaaaccaaatccgttcttgttgtcgaggcgtgtggacgcgtgttttgtggcatagtggatttgtgctggaaaggaattgtccttgtcaccatagccgttggctaacatttgctcgttcgctcatcacgaagtcctgtgttcctgccagttctttgttagttgttctatcagttgttggagtgagcatggcctgctttggtgccatgtgactgtgactgggtttgcctgttagttctaagtatggtcagattttcctttaatattctgaagccgtagttgaggttcatacaagctggtttgtgtttctggataatggacccagtttttcttggacttatgaaggtgtgtgtgtgtgtgtgtgtgtgtgtgtgtgtgtgtgtgtgtgtgtatgtgtgtgctgtgggactctgggcacctgtgagtgtagatgcctgtggaggccagaatgggggcgtcagatcccctggagctagagttccagaggctcattggagctgtcctcctggagagcagaaagtgctctcgtttcctgagccatctctccagccccctgacccttcttttctgatgaaatgtttccctttatgagctttggtgtttgcagtgctagtgacactttgtttctgttcaaagtgtttagcatcgaatacctttattttaacttgtacccaaagtgtagcatcgtttctgcaggttgagtgagctttgtaacaagcattaacccctgaaagaggaaacttgtcacaagcagacagattccagcacttaactttgacttccagtccagagctcatagatgggagacatgggacccagagtagctgtggatatgaaatggtcacgtcagccatgtggcaagtggtcagagcggtgactgtctgcagatttaaaatcttaagagaggattatatacaatgctgcacacaaacccatcatgccagtatgccttaaagctctgacttaccagagatgacgagttagcagagctcagaaggcaagtataagtgaagagacccccagagtggtagactagacctgtagacatggtcagtgtttaatgggtgtggtcttatgtgcaaagctctcagcatgccccctttgcctgcacataccctgtaggtggagggtggtgagtctaatctgataggtgttacacttacttcttagtgctttccaaagcctacttactcttcagacttttaacgccctccgggaatcccatgtcacctggcagcgtaatttgttatgttccttttccactctgagatcagtttcttttatctcacgtgttcccaaaatagtagataaaagagctccttttatacatccatccatcagtaaacagcttactgatcaaaacctcgtcatcatttctccctcgctaaatcagaggaaaatcttggcgagaggtgagtcctgctttgcttacgggtagcactagagccgtatctggcaagatcagccagggtggaaggcaatgcaggcaccgcacactctggcaacttggaatggattcctcggtctcactgatggctgaagtcaaagctttccgcttgcaccgaggtgtgatccgtttgaggctgattttattcttgataccgcaaacgaatagtagaaaatgcctggtgcagattgagtggcccttttgagtagacatgcctttttcctctgtgcttgagacaggtaagagacagttcacgtaaggagtgaagtgagccaaatgtatacataggaggatggcacacacaaaattagactgcagctttgctactgtttataggaaacatactcttttggcacctgcatcctctagaccagtggcaagacatctctttggagttaagtttaaagtaaactgcaggtggatgcctaggaccgcccccccagaactgagagcagctgtggtgttaaataccagaaacccgaataggtccttgaaattaaaagtgttcctatgaagaaaatgcatttaaaacctgtattattaaagtgtgatttctgaggaaatcactttattctagttctagttttactttttgttctcgttctttgcttatagaggcaagctctatataaatacctcaggatggcccggaaatcactttgtagcccaggctggctcaactctgtagtgactctcctgcctcaacctgccaagggctaaggttgctcttatgcattaccacacccagtcttgagggaacgtcatcctggggaggttctgtgggctttagccctgtgagtgtaagtccacagaatgtaagcagccaactttcacatttcaccccaacagtttacggtttcgttaaaattaagttcactatttccccataagccatgttgctttgaaagattaaaagccgtttttcttaggaaattttgtattttaacttaaacaatatttgctcagtgagcaagaattggtatactgtgttagctagcatctttgaactttttaaactttcactggttcatgagctgggtagggggttaatctctatcagcctgggcaagcaccagccaccttgtggattaggctggtttaaccttaagaaaccaaccaggtttccttggctctatgaagactcgatagaagccccagtgtaggggaatcgagggcaggggggtgggagtggttgtgtgggtggaggaacaccttcatagaagcagggggagggaggatgtgatagggtgtatctgggagggagggaagctgggaaaggggttagcatctgaaatataaataaagaagatatccaatataaaaaagaatgctgagaaagggggaccaatgaaaaataggagcatacttatatatttatttgtaagtatgaatctttgcgtttcacactctttctgtgtgtgtgtgtgtgtgtgtgtgtgtgtgtgtgtgtgtgtgtgtgtacagatcagaactcaaatcatatgcctttctcaatctgagtcccaccttatttttagagacacagtctttcactgagcctggagctcccactgattcggcaaactcccagaatcccaggcatgcagtattatacccagcttttagcatcatcgctggggaatctgaactcgggttccgtgcttcagggactgtactaatgaatgtgtcaaagaaggagtctctaaagcactctgcacctggggtaggcttgttggttgtagcatccctgccatgtggttttggcctcctgggatggggaaggatgcttagtgctccagtgaggctcagcggaggagggagagacaacccattacattacagtgtggttttggaaagcagaactcgttgctgaggagggtctgtctctgtgctgctccagacgttgctcctcgtcgtaagtgtgatcgctgtggccgcggccgtgatcccttggatcctcataccattggttccgctctcagtcgtcttcctggttcttcggagatacttcttagagacgtcacgggatgtcaagcgcctggaatccacaagtgagtacccgggggtcttggatggatacggtaatgggcttggtaacgcagagagcatccgtaatcgaggggaactgtagttaagatctgtgaaattctacaggctgactacaccccagcagtcctcgcctggttagcgttcatttggcagttgagcatggttgttacacccatcagggatcatttgagtgggtgacttcccaggtgtgactttgcagcttaacctgagaaatgagtagatgccctgtggacagtaatactcccccaaggacagggagccctctctgttgttcatggcttacctcccgtggacacaggaggcacacaagaaacgttttctgataaacatttctctgtaggctagaactaatttagaagggaagtaggggagtcagagaataaaggtgaggtacttctgggcgagcctccttttgtgcatcccggtggtgtctttagttcacaagtcttggtgcaaaggaagctgtgagcattcagagaaaggctggtcgtcccacaagcaacactgtgtcatagactgtgtcagtgtcaccaggccttgagccttttccttccaaatatgtataccttggtatagctttgacctagaaatgctcataattttgtctgggcccctgctggattcttgggtgtgagtcaggggctgtgctatggttttgctgttgcttcggtagccactgccagcgccactcacttggcaagaggcttaaacctgacctgtcctatcctgtgctccaatagatttttagagctctggagtctattttcagattgcacttcatagctgcatctggaaacatagttggctttagtgggagtttatcacaatgtcttttgttttgttttgttttgtttggggggggggtgtttttgcttgtttatttgtaaaagtaaacattgcaaaggccagtggtacatagttgcataaaaccacaacagtacttggatgcgtgacacaagctgaccctgtcatttagtaatgcctagattatgaaggtatgttgtcattcctgtcaggatgctgtgatccattagccatgtctgccacgggcatcagctatcagagtattaacctgtgccacatattttaagaacatatatcccgcagtgtgctcttccaaagcgtgccatgtcaggttctctagtgtgttgcccaccttgagcggcttagtgagaactccagtattggggataccgaccaggtattagcagagagagaactgtgggttctctttgtgacaaagtctagagaaaaacacccagcatacttaacgcagattactctccttttgagatactggctcagatgagaagagtgttggaaagaagacagctgtatagtgtggtccgagtaccccgatatgttcttccctttgtgagggcttttaatgtctgccctgcagggttctcatcgcttgaggtaatgcttggaagtccttgctggctactaccaatggcaacagaagaaaatcaaaccagttaatgacaagtgtcccgtggtatcctgaagttatcctggcagggcaggaacgcggcctgcaggctctctctaggcttcttctctgaggagaaacataatcccttagcttgtgtcccagaggggcttcagagtcctggaaaagccacaatattaagcaatgcaggatgacaccttcctgaaattgctgacaaatgacatctgtgtcatagagtctacttcaagatatccttctagtaatgtgggggaaaggccagatggcccccagaatgtagcatgcttgttaggtgaactagttaattattttcgtagtccttagcttacccaaatggcatgtgatccgtatgcagataaacagggcacagaagaaactggatcattttttaaaggtacaggtaccttcaaagccacccccaaatttcttggaattcttcatacacaccagtcctggttggcaggtgtttattcagggaacatttcctttctgaaaagaatatcaaaaggagaggtttctttggggtatcgtccacagtcaggtgcctggtcaggagacagcctcagggtgaatgatgcaggcatccacacactcatgaggaggctggccatcatcgccacctccagtggagatgccttgcctctgggaatgtagtccttcctcagtcatccctcagtgaactctgacctacaagatggttctttatcttgctgcatctgtaccctcacacaccccaccccaccaatccatccagctgcagtgtgcactgtaagcatggccatgtgagacaagggctggggctgtgcctcagttgatagcacccactaagctgcaggttcaatactcaacaccacattaaactatcatggtgctgcacatacctgtcgtcccaatcctctggaggtagaggcaagagggccagttcaaggttaccctcgactgtgtagtatgcttgctgccagcctgggctacatgagactccctttcagggggaaagaaaatgactggttggtttgctgggtcacgacttctgatctactcttgctagtacagtcttatccacagtgcagacggagcctgacagggagttacccttgcctggcagtgggcagcccacctgtcaccccaggtaggctgggacctggcagtcaggctgcagtcttctggagacacagtttcaggccatatattttcccccgtactcagagatagataaagaggaatttgtcctttaaattctgataagatgaagccactgagactctagcgagaatctggaaatttcaggacagtgagcatgtctcactagcctcagaccatgaggatgcgtttccagatgggtattcatgaagacgaggcttcaggaagctgaagtcaaggccaggccaatgatgtcccctctgggccagcggtatgggcgcaagtgcagtgacacccaggcacatggtagccgtaaaggactgtccttgcgctactaggaaggcttccctggggtgcagaggagatccctgtccgtttagctcgctttttggccagctggctgtatcaggtactctcaattactaggaagcaatagccacatgctagcgcttaaactagcaatctacggtggggagcgaagcatacatggatcacgctaatgtgctatgataaatgctctaatgaagttactttttagaacattaatagccaaaaaaaattaaattaactaaataactagtgaaagctcatttctttccaaagaaatagctatgaagtagagagagggcaaggatgggttagtgaaaggaacgatgactccgtttgactttggtggactgaactgaaacactcctttccgtcttgaaaaacgtggcatctttgactagggtttgcgggtgggtggacagggtcttctctgggtcgccaccagtgttttgttcaggagctcagagtcctttaggaagcccccagagtactgcatggtatgaagggtctacactgtggaccatggagtccacgagtccagcctcactgtggagcatgggaggcggggaatccgtgtgtccagcctccttgccatccagcctcattgagctttctgttctctttccatgttcacgcagcacggagcccggtattctcccatttatcgtcctccctccagggactctggaccatccgggcttacaaagctgaggagaggtgtcaggagctgtttgatgcacaccaggacttgcattcaggtctgtaggtttatggtagtactttcaaaagctggcagctgctgtacgcttaggtttgagccctgtggccaatcagttttgtcggccagcacctctgcctgtacttggactcctgtctcctgcctctgctcttaggatctgaaccctctcagactccctcatgtctggctttcctgattggcttgctcaacccttccacccctgtgccctgtggctctctctctggttacggctggggtctggggttggcagacgtatttttgcaaaaggcccggcctttttgtgttttgatgactcagaggcacttttaaaactacatgtggctcgttttaacacgctagttatttagatactgcccctaagctatgttccatccccaccccagggtgtgcagagcttgcaagtaaggaacaagtattggagctgtgtcctttgttgtagaaggactagaaacagtccacctataaggtgatgaaggccatttctctgtgttcgttgttatcattatatattataatatataccttactcatgcctttcaattctttttctcttctctcctttctttttttgaggcctctgtactgtttggggtagggtatgtgtcgaacattgctccgcatttcctgacttcctagaagttttgagtatgcaaccttgctgccctgttctgtcagcatctcaggacccccggccttcactgtacccagtgtggcttcttcaccgcagttagcggcttccgtgctcactcaacattgcctgttctgctttgcaatccagaggcttggttcttgttcctgacgacatcgagatggttcgctgtgcgtctggacgccatctgcgccatctttgtcatcgtcgttgccttcgggtcccttgttctggcgaagagtaagtgcagatgtgaataactatttatggtatgattacaatttatagccgtgtttgcagttattaaattaaactcttgccaccttgtctaatggcacattcggtgtggttctaataaagtgtgttaaagctcttactacacgtcagggtggataaggtcacgcagttcggcccagtgagatggtctgcttaggttctttttatttttgttagagtgagttgagatctatacagatgacatttttgaaaatccctggtctggtagccaggagatgagagccaagtttgccgtcagcactttgggctcagccctgggctctgtacttgagcctgagaacttcctggtttgttgatgagccagtgcacacagttaaaagagatgagcagctggacagaacacggtgctcactgccaggcgggcaccagaggaggaggtgtcagcgcgtgtggcgtgaattggccaagccggacctctctgcagcgacacctgaaccgcaacatttaacggtagaacaatgggagtcgagttttactgtcaaaagtgtcggttcttagaaaaacaccatcttgtttgcagtagtttccagctgtggctgcaggggacatagacagtgggattatgtaacaggctttaaaccatagtgacaaatctgaataatggcattgtacctcacacaaacaatgccctttcttcagtgtatgccagtccatctgagattaataaactcatctaatagtcctccagaattcttaatgggtttttaaaattgcatcataatctcagtcaataagtagaagtatgaaaactccggctgtataccacttgttgggtcctcctgtaaggtagcagaaagcagcaggctcctgggaggatggagactgattgactgtcctttctccttcctcctcccaaagctttgaatgctgggcaggttggcctggccttgtcctacgccctcacactcatggggatgttccagtggtctgtgcgacagagcgccgaagtagagaatatggtaatgtttatctgaaagttctcagcctttttaaaatcctctttgccattaaacgacataaaagcaattcttatgtaaaatattaaaactgttattttttgcatcgcggctaacagaggtttttggtttttttttttttttaagatcccgctcccatctgtttaatgttaatgtaaaataaaatgtatacatctttttctctgtctcatgtatgctatgtcagcaggttttagattcatcacaagctgtcttcagatgtaataaatgcctctgtaggagggaagttctgaaatcctagagaggatataagctaatttctcagaggcctgtttatttttgtttcttaatgggtaattcctcgttcttggtaagagaggaattcagtattttgaggttgttggtttaattaatagctctccccactcccccacttctacccgctcgtcaccagtttttagcctcatctcccatgctaggagtagaaggcagggggcccggggtcactgctgttcctccctggtaaggcaagcttccatcccgaaggtgtttctcggaggtagctggctgtagcaatggcagaaggtttagtcaacatgcggactgttccctcttcaaaatatttactcctgctaatgacagaaacagtcactgtgagatactgccattcgtcccctctcacacgatagtgagtatccttctgtagcaagagattattgatgagagggcataaactcttgattttacaacccccccttttttaattggatagtttttttacatttcaaatattatcccctttcctggtttcccctccaaaaactccctatcccaccccctcatccccttcttctatgagggtgctcccttacccacccatacccacttccgtgtcctggcattcccctacactggagcatcgagcctttctaggaccacattgatgcccagtaaggccatcctatgctacatatgtggctggagccatgggtccctccatgtgtactcttgggttggtgctttagtccctggaagctctgggggagcgggggggggggggagggagtctggttggttgatgttgacaaaaccctttcattgtgtttgtggaaggtgttcgtgtgtacgtctgttatgtatgcatgttgcgtgtatatgtgtatgcacagagggtagagatttgtacaagtgacttcttcaatcacctttatattttgagacttagatgctgcgaaaacccaaaggtcttcacgcctgcgtggggatccgcttatgcactgggtcttcacgcctgcatggggatccgtttatgcactgggccatctctcccacccctccccttgctcttttcactcagtgttataaggttgaagcgactgtctataaacagagctggtgttgatgagcaagactgtaaatcatcacagtcttcaatagtctcagttagcatcaagacccaagtgacccttacccagcctcgtgtgggtgaaatgcacccgagatcaagcccctagctggcccctgaccgtgtgaacgcctttcctcctttagatgatttcagtggagagagtgattgagtacacggacctagagaaggaggcgccttgggagtgcaagaagcgcccacccccaggctggccccacgagggagtcatcgtcttcgacaatgtgaacttcacctacagcttagatgggcctctggttctgaagcacctgactgcgctcatcaagtccagggaaaaggttggtctgacccatcttgctcctctagactttcagctaaagataccgggccagatgtccatgtggatatccggctgagcccgtcagcaagactccctgttcccccgtggatgccagtcagtccagccacctctagaggcagcagaagtaacatcaggacacaaacagcatcagggcaacccgccacatcctcccccttgaacacgaaagataagtttgtgatcctgcttagtgtctgccttcattccccatggtcggtagggccggggtcaccgagcttactcagctaacaccagggaaaccgtaagtgctggagttagaagttccttttgtcctacagacttgaagagtctgtccctgtccctcccttcaggaccagcgttatgctttacatagcagctgtctcttccagtgctttcctgtttcagagcctcaccatggctggctgtggccatgagtctgtaactctctcactaagttcttctgaggatgattcatagcccttttcattcagataaactatctctgcctctctggaaggctcctctctctcacaagcagaatcattcacgatgaccgaaaggtgagagcagcctcagtgtccacggaaaggctcggcagagtgcggtgggtgcttccgcagatggtatgcagcctttaaaaggaaacagcgaaaccccagcacattctacaacacggatgtaccccggggataacatacccggccagagaagccacagaagcgcaatcctgcatgaacccactgtaccgcctggaattgtcccactcatagagacatgaaggatggtgttttccagagccggggacggaggggcgcagggagtgatgggtcagatgatggatgcaggaggtctacttttgcaggctagaaagccctggatatgtatggataacaatggaggttgcgcactagtgtacaactaatgagtactgctgtccactgtgcttaaaatagttatggtgaggaattttatgttaatttcccacaatttagaaactgcataaaatacttgagagtgatagtttatatagttgtcaccccatgggatttatagtcacctgagagacagacttctagttatgtctgtgtgtggtgggaggtggggagagggtatcttacttagttaattccagcagggaggctggtccactgtgggcggcaccattccctgagctggagtcctggactgcatactaaggagaaatcaagcttgcataagcgtttaccactctgttcccgtgaccgtgaaggcagggtgaccagccccctcatgtttctgctgctatgagtgcgtcatcatcatggactagagccttggctgccaagacaaactctgtctctctgcttctgtcagggtattttgacacggtagcgggcaaactaattaagacaaatacatctgtgtattttgcagaaggtgtttgtttgtttgttttagggttagagcatgaattgaagttctggatatagctcactgtgccctggggcttcctttggaagttaggggacattctgatccctgtcattctgcagggcacatggtagatactgaagagagatggctatgaatatgagcaaatgagaagcaatatacaggcaggaagaagcctgtagcaaaaaaaaaaaaaacaaaaaaaaaaaaacaaaaaaaaaaactttatattttaatttaattttatatttttacttaatgaatttacgtcctgttcactgttcccctctcagtcacaccccacacacaattcttctcccctccccctccctttcttctctgagtgggtaggggcccctctgggtctctctctctctctctctctctctccctctctctctctctctctccctctcactcactcactcactcactcactcactcactcacttcaagtctctgcaaggctacgtactttctcttccaccgagaccagacaagacagacaggctagaagaacatatcccatatataggcaacagcttttgggatagcctccattccagttgttcaggacccacatgaagaacaagctacacatctgctacatatgtgcagtgaggcctaggtccagcccatgtatgttctttgtatggtggttcagtctctgagagccccaagggtccaggttagttgactctgttggtctccctatggagttcctagcccctttgaggctcacagtcctttctcctattcttccataagagtccccaagctccatccactgttgggctgtggttgtctgcatctgtctgagtcagctgctgggtggaggctctcaaaggacaacatgctcctgtctgcacgcataacagagtatcattaatagtgtcagggattggtgctcgcccacaggatgggtctcaagttgagtcggttattggttggccattccctcagtctctggtccatcccccatgcctgcatttcttatagtcaggatacattttgggttgaaagttttgtgggagggttggtgtctctattgctccactggagttcctgcttggctacaggaggtggcctcttcaggctcaatatccacagtgttgtgagtcacagctaaggtcacctccattgattcttgggtatttcctttatcccaggtctcctcatactggagatgccctccctccctcctcacccctgtcagttgcagatttccattcattttcatggccatctagccatctctcctgtccttacccacacctgatcctgaacccccaccaccaccattctccttcccacaccccctccctcccagatccctccctccatctgtctcttacgactgttttatccccctttctaagtgtgattcaaacatcctcccttggtccctctttcttgtttagcttctttggttctgtggagtatagtgctggtatcctgtattttatggctaatatccacttataagtgagtacacactatgcatgtcctctggggactggattacctcactcaggatgatattctcaagttccagtaatttgcctgcaaaattcatgatgcctttgtttttaatagctggatagtattccagtgtcccagttttctttatcccttcttcagttgaggggcacctgggttgtttctagtttctggctattgctaatgaagctggtatggacatagctgagcaagtgtccctgtgggatggtggagcatcttttaggtatattcctagaagtggcattgctgggtcttgaggtagagctattcccagttttccgagaaactgcccaattgatttccaaaaatggctgcacaaattcgcactcccaccagcaatggaggagggctcccttcctctacatcctcaccagcatgaggggctattgagtttttgctcttagctgttatgatgggtataagacgaaacctcagagttgaacaaaacacttctgcagacaactctgtcaacaacccgtttcctaaacaggcatggggaaacccactcctccccgtgccctttgtctctctctttttttttagcttctgtgcactgagcgcaggcactcaaatgtgaatggcaaacgttctgccaccacgatatacctgggccctggagtgtgaaatacttcaccagctgcttctttaaactctccctaccaccaaaccatttaatggactaatcacagctgtgatttaacgagtgatacccttgcgacatgaaagaataaacttacaacgtggtgcccaaagggtatgcaaggtgcagccttagcaagtcacttggcaaaagcccgaccctaattatttccacggcttccttgtaggtccgcagacagggtggaggactgtgtgggtaaagtgtgaggtacagctctgatgaaagccgagcctctcggttgtgtcctgacagctctgtaggatgcttgcttgcttgcagacaacacgcttatcagatctgacgtcgagggcgcagttctcttaatttgcacgtgtcttccatttccttggaagccacagaagacgaattatgtgaggaactctgttgaacaagttagaaaacaatgtgtagccccagacttgtatccttgcatcttaaaaataccccaaaccgtaggattacctgaggtgctaaaaggctggacaggaaattgaatttgaaggatgaattatatctgtaataacttcattttttgacctgtgtcttcctccccttcctcccccaatgtctactgcagtagtttatactcatttagaggcagctgcaccacgggatgttctctttctcctgtaactgtggggtttagccttctccttatatctcttcccaccccccatccccccacacacacacttgctgactgtcgcttcgtgttggatttaggggaacagatttgttctcttcgaatggcttcctccaagatccctggaagttatgggaaaaactgaaactgtaatcatgacgagccaggttcctaatttctggaaagaacaaaaatgagctcagtagcaccccaggtctccagttagcttccagacactggctgcccttttcatttgggtgattttgtggttgatttgaccattggagagagtactgggccgttcaaaagcattttccagttctagaagtagattgatttgggtgtgtcatctttttattttttttttcttgctcaaagctattactttgataatacatttttacacatgtgtgccaggccttgctataatgggcaagaaatattagtttcctaccttttctcccttttttacataatgttttctgagagaggcttctctgtctgtcacgtgtgggacttccacctccccagcccgtccctcagtcctggctgagcccgaagcatcacgtccaagaatgtggtaggaatacagacactctaaacgcgccagtgggccctcagctaagcatcctatctcacgggaattgttcttgatttctatgggtacctcaccctctcctgggaatggcagagggtggggggttggttggttggttaaggttttctctctgtagccctggctgtcctggaacttgttctgtagaccaggctggccttgaactcagagcttcacctgcctctgcctcccaagtgtttttatcaaagctgtgtgccatgactgcccagcacccccccctttttttatactttaacattctatccatcatgtggtaatataattcttcctgatcacatggtgatgcgtgggttagcatctttctagtggtcacagactggtgtcacctgcaatccggccattccctgggagcagcctctgttgcataccagccctaccagccctaccagccctaccagccctaccagccctaccagccctaccagccctaccagccctaccagccctaccagcccatgaactgccagatttccgttcttttcatcacttcgagacatacaaaagtaatcttttgtgagatggctcagctggaatggcgtttgtcccatgtgatggcccctgttcacctccatcctgactctgaactctggtggttgaaggatagaacactgtcttgcaagctgtgctctgaacccacacgtgttgtgatagaagttgacatactcccccacccccaacactcacaattttttaaaagtagtttcactgccctcaactggacatcagttctattctactttccggatgatcaatcaacctcagacttctctcgcctgagcctgagccatggtgtcagtttgtcctatgaataactgctttctgattagcaagtaccccaatgttgtccatccctgacactagggagcccccacgcaatggataacacagagattgaccggagctttagtccctctcagacagatacaggctcaggtatgcccgacctgggcacaggtccttaagaatctgcacttttctgctttgctctatcaagagtgatagggcctcacatctgcagtgccccagcacagagaccaacacagtaaagcgtacgaccacatttggctgccattatccaggagttaggttgcttagccacttaagctgcataatatatctgccccaagaaaagaagcagttacccacttactgttctagtctccagtacaggatttacctgttaggtctatgctctctgtcttgcgtgttgtatacatgaacattttagggatgatttcataaaccgctcaagctggagatgaactcttaactcctagggaattgctgtttttcctgtaacatggcagaaaaatgcagctacctacaggagaatccagtgtagtcctgaacaaatggtcctggggccgcttggactctgtaggtcatagagttggtatatgtttaaagagacagttttgggggcattggttaggagtggagatggccgcatgagggacagatggagggtttggtggggttagacatttgtaaaatgcataaggtcggaagatagaagtgagtgtgacaggtatttggatgggaggaatcacactcacttccacctgctaggcaagtgtgtaacacacactttcgtgtgcaggaaccctgcagaagtgtctgtggtgctaaaggtggacacattaaggatatagaggtttcctgggtgaaatcccagaaacagagctggaactgagttgtgagtgcctggggaggccagtaggaaagacaggaggaagatgccaccagtggtcacctgctcctagtgagaaacaaatggaggacaggatcctcctgtggggaatcaaattaatgctggttagaaaaaaatagaagttgtaacttctccctggggagtgtgcaaggcagtgattgccgtgaagatcaagaaacggcttccagaggttggcttggcaggaactcacttcttttgaagtccttgtacctgttgctgctcagaaagtaggtccacacctaaggatttattttagggaaataattaaggttgtttggaaagatgtagcttcaaggacatttaacatgatgctgtttatagcatcagaatattttgtaagcagctgaaacattcgcagtaagagatttattaaataaataattgtgtacactatattacatgtgccttaaatatttatacgaacccataaatgaccacagcattcatatgaactttattttgtttaactctatgagcctaagtcttaggcacacatagctaagacatgtatacatgtgtacacgcgtgcacgcccgtgggaagcactgttctgtccggagtgtggaaacgagcgttgatattcatttactttccggatggattgcacaggttttaattaggatgagtttattctattttattttaatgtggccttgtgttcagccggcagctgaggaaattagaaacaaaggtatcaacttagaaagcaaaagctctttggagcttgttgttgggctgcctgggaggaagctggaagcagggtggcctgagaaactgtggggaagtccatagcagtagccattttgagtggaacattgaatattagtcctactgagtgagtgacattggatattggtcctactgagcgtggagtatggagaattgatcctgttggggctggaaaagaagtctcagctgttaagagcacatactgctcttctgaagaccccagttcagctcctagcatgcacaacaggcaactcacagctgctcgtaactccagcttccagggctccgcctcctcaggtacccatgctcacatgcacatggccacactcatgaacacatgcacatagtctttttttaaaagtctaacatgttgccaccgtgattgttggagatgagccttggctaaattggggaaacagaggctattgaaagagctaagactggatcatctccatgcgtcactttgtggcgtggccctgaacttggtgatcgtcttcttctttggcatctgtgaaaaatccaccagttactggagaaatgccctttagatgacaattaatggctttcataggcacaagtcatcaatttttgtttagtttattttgttttaaattatgaggataagttagcagttaacggttctatagactggctgctctcagccttctgtttttatgggcacatccagatggtccctcacagactatagccatttgagtcttcaccaacgcattggttttctacatgtcacaaacatgggtttacctctgccttcgcgtgtggcagtttgtacaagtgaatatccagagatgggagcaacataagtgtgtatgcagagacacacctatgtacagaatcagcacttctgcgaggtataggttattgttgctcgtaagatagataacatccacagagattttaagactaaagccagctgcttacaatcactctttttggaaggccattgctgatggtgttagaaaacatccaagcgatgtaacagaaaatgcccagcatatagttgggtttggctcctgtttagaatggtggggttttctttttccatctcctaaatttacttaccagtgatagaaagcatgtctgtgccctccactgactcaagtttttttttttttctttttttttgagacatggtttctctgtgtacccctggcagtcctggaactcacgctgtagaccaggctggcctcaaactcagaaatccgcctgcctctgcctcccaagtgctgggattaaaggcgtgcgccaccactgcccggcgactcgagttttaataaggatgatgctctcacctgttgagcaagctcactggagaaaaggctcatttctgctcataggtttcagcatccactctcaaagccagttttcacaattcagtttcttccctgaccaacatccacctgcattatattgattctttgatcttattgtcagtacgcttcatttctctctgctctggctttaataagaggaatgattcttcacacaaacctttcccaaggggcaattgtacgtattaattggtttgtaaaatgccttttgaactgctcagatgaaaggccccatgtaaatagcaaaagctatttatggtggtactgttgttggtctcattatgtatgtttgggctactggaggactgccttttaaggtgtggagacccgagtttgcaaacgtgaaggtattttctctagagccacaatatatactttctctatcaacgatgaattcatggtaaatgataggacactggaagaaacgacgattcgggagtgtgcgattaacaactctggaattatccaagcagttcttaaggttccacaaacccagaccttggaagtggggctcatgagaagccatcttctcataagctactaaagaaactataggcttgtccctgccataaatgtgactcttgtgtacccaagggggtcttacccagggacaccttgcccccccagagaacatttgccaagacttgacattttaggttgccacagtttggagggccctatgggtttctggaaaggacggcccagggatgctagtagacactccacgaggccacttcagcatccactgtgaggaactgccctgcctcacaggtcagcagacctgaggctgggaacttataaaaagcagcttcgtagctcgcccttgaaaatgagcatgctcacctaggtgagctgcagatggctcatttttaacccctgcccccggatttcttcgcaggttggaattgtgggcagaaccggagctgggaaaagctccctcatctcggccctcttcaggctgtcagaacccgaggggaaaatctggatcgataagatcttgacaaccgaaattgggcttcacgacttaaggaagaaaatgtcaatcataccacaggtatgcaagttagagcgtccacacacgcttcttttacgggagtattgaagtttaattgcttttaattttattgctgggttttttttttaattggaggaaagggttgagccattaaccaatagccaatagggcatacttcagatattttcaacatgtattttcgtagataacttgagtgcatgcgtgtgctgcgtgtgtgcatacgaaacagagagacagacagacagacagacagacaggggaagatcccataataatatacttaggttcaatctagattcagcgtccctggtattacacttttgtcctctgataatgacataatatgtagtgagtaagagccttgtgtaaggatgcgtgattgtaagtgtaatgaggcagtgagacaataataattaataatagtcatcatcatctccaggctgtgagagttaagaagcaatagacgctttgtagacactctccaaatcaggacatttgggaagtggcttaaaccggggagagggagccgagggaaggttcacatctctgtttacttccaggcaggcagtggcatcaccgccgctgagaaccgcagtggctgagtgcttcacgccggcctggattgtggctggcagggcgctggtggtttatgctgccatttcttcctccttgccaccccatagccgaagatgtccaggcagtgtcaagagagtggatcactcatgtagcttttggtttagtgtcttgccacgttgcttttagttctacccagaataattcagaaagtctttattgagtaatgagcgtcttctagttaggcagccacaggcagcatagggcctgaccccacaggcctgcagcctgcagctcgggagcctggcagcttcgtcccgccctcggcattgacgctctcgatcacatggattcggctccaggcttgctttggggaggggtttattttggtatgttttcacactctgtaatcacgtggccatcaaggggagttggggaacctgcacacatgcacacatgtgagaaatgcagaggagagacatgggagaaaaggcgaagcagctgtgctttctgagcaggtgcccgctggggggttgcttgtgtattataaagtacagagaacctaacactcggagagaaggggactgtgggctctgagcctgtggcctcccaccctgacatgtagggtacttgtcatggtagagcaccaccgcactgtgatgaggtggtggagaaattaaacctctgaggtttactagtgggaagctaaaatggtacagccaccgttttacacacaagcatggggactcctcatgagactgataataggactgcaacatttccagcaattccacttgtgagtgtaggagtgtgtgcgtgcgtgtgtgtgtgtctgtgtgtgtgtgtgtgtgtgtgtgtaaactcatgcacacatgcacatatgaaccaaaagcagggaacagcagagatatttgctcattccagttcatagcagtggtattcacagtagccaggaggtggaagccacccaagtgtccatcagcagatgaatagcgaaagacaaatgtggtttatacaaacagtgggaagttactcagcaataagaagggaggaagttctgatgcgtgctacaacaggagcaagctccaaaagcatcatgcagcctgaaaccggccggtcacagaatgacagagagtgaacagttctgatcacaggaagagtgtttaaattcaaggagccgcagtcgatggggaccactggggaccccaggacaggaaatggctttgttgaatgggaatggggattaaagttttaagaacagtcagcctgtgattggtgatgaccactacaaaggatcataaaaacacttagcaccactgctatgagatttaaaatgacggagaggggagggaccaggagacgctcagtgagtaaaggcacacactgccaagcccagtgccctgagtttgatcctcattgccacgtggtggaaggaggaaactgatcagaaagttgttctcttagctctgcaagcaaaccctggcacacatgtatgcacaccctcaggtaagtaaatgtaatagttaataataataataataaatgattaaggcatagatttcttgttgtacttgtattctgacaagttttttaaacattcaaaagacccttttaagaaaaatagaggaagcaatcttccatcacgtaactttcccctgagcatgagaagcatggttatcatagaaatcagagctcaaatcccaggggctttgaatctcagaaatgggcctgagaagaggccagtgtgtctgtaaagtagctcacagccttggatggtaggatctagaaatgtgccccacgctacttttaatattccttagtaagaaatggttgtgtgcttgtataaataaaagaactctaaataaagaagctgcattcagacgattcttggctctgctgggaatggtttagaagcacatctgagcaaatgctaacacaccttgacatcaccaggtcttggtgctgttccatgagatcctcctttactgcaaaggctacgtggatctgctcccaagaatgcgttcagaaaacagtgcttagatttgtgtctttgtagaacacgatcactatgcgctgcaagcacagccggtctcctggatgctagttggttgacataagaaacaatttggagaaactatgcatgtgtatagaccccaggatagactgcagtgtggaaagaccccaggatggtctgtgcagtgtggaaagaccctaggatagaccgtgcagtacatgcgcttactgtcaacctgccccgtatttttatccatctccgactgctgggagggaggccttgatggagtcacctcactccccaggctgagtttctgtaattaccacctctcagattcttcatgaaggatcagctgcgtgatagaatgggaatggcctgatgtgtgcttcttaaggataaatagtaactattcataaatagtaactattattaaggcttatggtacagtcctatatgtgtataacccattctagaaagacttaggccattaacttctctttaaactcttataatccctggtgattttctttaaatcaaattatttacataaactaaacttagtgaaagaggaagcaaaaacaaaacaaacaaatcctcccaaactcagagcattactcagaggcacaccaaaacccgcatgcacgtgcggcacacagcggggagaggatagctatggtaaaacctgacaagcctaatgtttttctcacagaagcaacacttctcctaacagctggtctgcagccctaggtgctgttgcagtctcagtggagttcttttgtctttgtgctcttccctgcccccatttcttaaggttttcctccatctgactgctttaaaggcttgttgcagctgtgacagcctccatgtttcccttcttcccaggcccttaacccatccccaaaccctcatttgctgaagagtcaggcccagcagctgcatagccaggagtccccatgccacctcctggatcatgctggtttgaaactgacctgtggccaaccatatgaactccatactaaaatctgaatgccttgtgggtcatctgcccacctccacacacccacatgctcagaaacaaacatctcacaagcactatcactccagtctgtgctgtggtattttctcagccctgtttatataaaagagaaaatgacagtcaggagcctcaaaattgatttcatgagccactggtcacacgcctgccctttgaaaatgctgtgcccgctgccctgccttggggactggtgcctgctgactgctaacaccctggaaaaggggagcctttgatagagcagccaggaaggaaaccaaagatggaggagatctataactcattactaactatcacgatagtaacatcagaacttagtattaaccagtctccacattctttttctcgtgaatgtttataatcaaacgacgtaatgtcagttattttagtcattgtctctctatccaccctgcctaggaagggttcctaaaactatagccagagaaaacgaataaactcagacgaaagtcaaaagtcgcggaaagccggtaggcatcttttcctaaggctcttggctcggtcaggcgctttggaaggcagttttgtgaaagtggccttgcccaaaaaatacaagtgacaaatagaaaatcattgtagaaacgtggattcactgggtgccatactgaaggagcgccaagatactcaaccgtggaggcagagcccatccttgtatgtgtagagaattccaatctacagagcgacgggggtcaagcatcctgctgccctaagtgagcaggagccaaagctgattgtgtagcacgggaagcaaaagagaaatctaggtccgccaccgagttgcaggtctagatgaaccaagccagcagcccgtttggggagcagtaacttcttgctctcttctaagctcctccccttggttgatggctaagctcctccccttgatagatggctaagctcctccccttggttgatggctaagctcctccccttgatagatggctaagctcctccccttgatagatggctaagctcctccccttggttgatggctaagctcctccccttgatagatggctaagctcctcttggtagtagacagctaagggcctgtcatttgtcaacctctcaggggcaattcagaaatagagtttaaggaacagagggttcctaagattggtgacagttctgggcgggactcctgagctcctttaagtaacaagtgaacggagacggagccccacttgagctgtatcttcctagagcagaacaaatggctgacacctgtacttcctccgtaccccctaccaccttcgccaccgccaggaagagagcccaagatgagcctggcttcaggaacagcttatcagaaaacatctgcccatgtggatctcaacattttttttctgggtagaatccctttacaagcagagccttttttttttttttttttttttttttttttggcaccaaggaaatgttctcaatcaaagagcaattcacagcaaattcccatttacaacggctagcaggggctgatgtgtaccaacatctgtaatctttatcatgatcaaacagattctttgtgtatgtttaatagattccctttgtttgtaccaaaacaaaaagccaggtgctttttaaacagcccacttctttttaaaattcccctgagcttctaatgagtttaaaaggttaaccagaactgctatgcctctttaaggcccctttctgatcacctggtgtgtgtgtgtgtatgtgtgtgtgtgtgtgtgtgtgtgtgtgtttcaaagagaaaagagggtaggtgtggtgttactagtaaagaaatacaattggatcccagcctaatgcagtccctttgttcctgcacactgaagtcttcattaaaacccatggcactgttccctggagctggtgacctttttgtatttaaaggcgactttacaggacttaaattcttctctttttgtgggcgaacaatgttctcttcttctgaggttgcatgatggtgagttcattcagaggctacaggactaagggaagaagaaaagagaaactgagcctgggggacttcaggtgacgccacctttgagaccgggaaccgctgcccggcataaggatcagagtagacggggcttgggaggcagagcagagacagttcgggccccaatgcgtggatattttaggagagggatgtttcctggttggtgcccccagaagatgagagtaagcgttgaacattacgcttgttcatttgtactttttgtcttggtccctggttggcttaagtgtctgaagttgagcgggttaagtttctccttagcataatggaggcctagcttgtagtcagtgcattcaaaaagcctagtaaagtctctaatttggggaaccgggattatcagcttggtaccccagatggtttcatttagactggctgcttctgggtggcacgcctaataagagcgtgtgttatgttagtaccagccaagctcctgccactgaatgtgctgcaaaggcttacaacagtagctggatgatgaaaaacaagtttgacactaggcttctggttttattgctgtattgaataagtgcatttattttcctaatttgactcttattaaagcctatatcatcagaggaaatactgaggctaataaattaggttgtcggttcctcccattgatccctaccctgaagtcttctgcctgcaaacatttttttacaacacttatttataagactagtttgtgaaattcattgcttggaggtgggtactttaaataataatatctaccagaaataataattaacttcacccttatctcccctctcagtatgtatctgctatgaggacttttttatgaccttttgaagataatattagggattttatttggcaggtggataaactaaatgagcagtgtataatgcatttgtcctagtaaaagcagcattgtcaacaaattgcctgctacttttaaagaaaatatagctccaaccagttaatgttttattaaatcactctccttgttcaacaagtcttgatgaaactttacttatgaaatgtgtatccggcgtgttgtaacaaagaaaactgctcttgtttacttaattattttcttctaacattgctaaataaacatgagtgattgcccaatactccctttgagttgacagtatagatttaatagagacccttattttagtgaatagtggtctagggataattagccaaacttcccaagggtctcttgtttgaagctggtgtttaggatacaagagaaagcaggttctgtggctgatacatataatatgatacatataatatgaaggagtttctaatgggaggaggtagggataaggtaggcgtcagtacctgctcgtgagatggggcgttggaccagaactgtcattcctctaaggcaccaagccaccattcctactatgctaatactgtgaactttgtatgtctgcagtcacttacatgtattagtgttcaaggtggggcactgcagaagtctaggagttctctgtcagagtctagacctgatatattggatgtgattttgctgtggaacctggaggaagaaaagctgaggtagatatcagatctcctggacaaggaaagtgacctgtccttcacataaacgaagaaaccaactcttatttcccacgtgggctcaaagctgattcctgaccatggttacctcaaggctctcatatacacactcttagagccacttagtcggggcctctgcgtagcgtattggccgtggtgctgagtctgtgtggagaggtcagaaaagcatcaaagagagaacagttggcagacagcaacgtgccttctgtgaacctcatataagcaagaagagaatttacctgtcttgttagttgtgctcactcgtcctccctccgtgtgtgtgtgtgtgtgtgtgtgtgtgtgtgtgtgtgtgtgttttaaatctgaagtcagaagaataatgtttattctgctgataagaaagtcccaccacatgcagatggccatttgtctttcatcttacattctgtaattttaagcataaccttagataagcctttggtattccttcagtttgatttagttgccattttcaaatttcttatgacttcacaatcaactttgcacaaataaaattcaacaatggtgtcctagttcgggggctgtgagggaatttgaaggggaacagccctggtcttctgacacacatttttttttctgtcattagtgtaaaactaagaagcagtaacagtatcagtctttgaaggaaagtcctcctccttggtcttttaagtgttcaagaccctgttcaaggctaggtgacacatctgtagtccaggagcagtccccgggacctgtgggaaagccgtgacttttgttcttcacctctgtgtaccttgagattcttcacagccagttgggctcttctccgctgcccatgtcttatggcttgggttgtcagaactcctagaagaaaatccgtgcagcccccgtaagcgcacatacacgacgctgccttaaaacctagaaatcagcatgtgattcgggagcaactcctgaatggaagttgcgttagccgtccgagcttcacaatgggtttcggcttaccgcgcccttgtagttagcagtgaggttccccagacaggcagtcctgatgcacagacaagataatgtagggattggctggtgtgacgtcagaggtcatttccacgcttggaagggccactggctccgtcagccgcactcctccttgaatgaagaatagaatgcgacccagaagactcttcaccgaaggaggaaataacaggtttcacccaagcacaaactgttcacaccacgtcctgttttccagagtcctgtgagcacggacaagtagttttttcacgttactccaataaacatagctttgtttatgaccaggaaagtgtttttaacaacaggaacccaccttcctcatttcgttcttaagacggcacactgccacggtttcttctttgagcgttccgtgcactgggaaggtattttggagcacatttatgtgatgggaaatttaagagcagtgacattttatgagcgagcgtgttgaaccttagtggactcgagtgcctttgttttcctttctatgacgtcctgaaagtcagaacgtggcagtgacattgactctcttgggctcttaggaacctgttctgttcactggaaccatgaggaaaaacctggaccccttcaatgagcacacggacgaggagctgtggagggccttggaggaggtaacttccaccgttagcatctgtgtgtgcctctgttgagagcacttggggaagcaggggtcagtgctggaactatctttagttcccacttggaggagcattgatgtttgtgaatgggcgtgaagtgtgtataaaataatatgcatcatgctgcattttaacttccccaaatctgacttagccaatacattatcttgcttgtcctttgcaaacctcaaactctcctagagactcaatgtcctgtacaaatgttgtgagaattcttcccggggggtgggggagggcacatgaacaatgtctccccactcagcacatcccgaggtcccaagaacaaatcaaagttcagttcaccaatgatccctgtgggaaaacaatgggcttattaggttgtttgtttgtttgtttgtttgtttgtttttacagagtgtggatgagggggctatagagtgggtgaccctaaagcagccgttctggaacatctgcacctagcataggtgattcgttgagggagcaccttccataagccttccccaccccgtatactctagctccaccccgagtccccaaggccatgttcagtcagggcagaacttcgtacacatgaacaggaggagtgattggaaatgtgtgtgagggtccagtgaccttctaagggcgcatgccaccagtccatgagctgtcatgatgattgacaggtgcacagaggcccatgagctcaggaaggtgggctgtgtggctcagaaggtagtgctctacagcagccacttagcttcctgctttttctggggcagaggaagcgtctgcgaaaatgaggccatctgttttcattattaactgaagggaaaatgacgtcatgcttaaacaatgctcccgagtctcccctaagaaagtgtttataaaagcaaattacacagaatacgagagcactgtttgcggacaaacctgtcattgtaacgccgcagaagagtccagctggcagactcctggagccttggttagcttgctgtattgatacccttaattttggaggattttcctgttatttgtgtagtgtgtttctgcaggccgcttctcgggggttccttactcgcgcaggcaaaggattttggctgtgaaggtacttctagtttacgtgttttagcataagtggtttgcaagttcacgctagttctgcaaattaattgtaagctgcttaataataaaaatccctcctggagcctagctcagggttttactttttaaaaaatcagcggttaacggagacgcggtaactggctgatggactcttcgttgcagagactcgtggtatatttcttagagacaaacactaaaaatcaccagagctcagagatcagctgccctctgccattaccatagttacggttttgaagtagcgtcttctcccctgtcaccctttctggtaagctccgacatcttttaacttaaagatggcttctgactgtgtgcacacaccagttgggagcctaacggcaaaaggcatcttcaaacgtggctgccgtacactttttttcatctgtcacccacaaaatgaaatgttgctagcttcccttaactcacaaccgaggtggcggatgtgtaagacagtcctgagggtcccctgtgcttagactccacccaagccgccctaacagtcatgaggagaaccagtgacaggcccaggtccacgcatatcaaggtgtccgtgtgctgcatctggggctgatctcaggcgtcttggatgcctctcagcagtgaggcgccagtcacacagtcgttctgtttctctagaaatgctttgccttggtaatatttttaagaaacagggttggatagtttttaaaaattagaatcagtattatagtatgcttccagctggcccctcccctgtatgtgtgtctgtctgtctgtctatgtgtctgtctgtgtgtctgtgttagttttcctctgtgtacatgtttttggagaacgccaatacacttgagtgtacattgtcgtgaagaagccaaagctggatataaagattactttctcagtcactctccaccttatttttttgagacggtttgtcactgaattgggcttaccaattagtccacacggcctgaccagcaaggcccggggatctgcctctattttcccagagcttggatcgcaggtccacaccaccacatctctcccacgtcagtgtggggttcaggacgttgcgccacagcatacactttcctgaatgagctggtcttggttgtacatgtgttctcagtcacatgacctaagaaatcttgtctctaagattgcttatgtaggggttgtaaaacaccaagtgagtcttttggggctttagtgtttttttgtttttgtttttgtttttgtttttcccttctttgtctcttttttctctcccgaatatattatgtgtgtataatctcaaatatattatatgtttactttttttcttttctgaaaatttcagccttctctaatgcattccgattctttcatctcctggacagagagaggcaagactcttagaagatgacgagctgtgaggttttcctggcagtagttagagttgtgtggccacaagggtgtgaaatggcatcaccctgataggtcagagaggcccggcctgggatccttggagtctcaggctgttctgcagtgaggtcacaactcccacctggatggaggcttgatgctgtgtgtgcactagaggagacctggccatgccccaatgacacatgggctccctggatctctatctcatgtcctctgttatccccgtgactcccctctttacactgtatccgaagcagagcaggccctgccttccatgaatagtgggaaagctggtgacctcggctgttctttttaaagtaagctaaagcatgcatgactgaggggccatggccctaaacatagcatgtgtaagaaaaaggagggagaggaagagaccaggagggcaacccaaacctctgatccttttataaaggatgtcagtgcaaatggggaacccgagcccacgggttcacgtgagggcccgcagagagtgtcgctggttttatatcctggaagtgaaaggaagaagtgaggcatttcttacatccccctgtttcccaccccaattcctctcttggaaaggagagcgccagagagagagaaggtgggattgacattcagacaggaaacgtttccgtgaacattgtccattttgttgtttaactttctggctatactgaagttgtgtgctccaaacagtcagtgacaaagagcagaaatattgctactattgagtaccttgtggagcatcctggaaacagtggccgctgtgtaaaacggcagacgtagtaaataaagatggaacctgccaaatgatcacagcagttaaagcaaatcggccgcgtattgtttctgtcttaggtcagcctgaactagagcagacaatgaagaacagggatgtctgtgggtgtcagagtcatctagtgatgtcccagatggggcgatctactaggatatacggtgtgtctccttgtacagggggacaccatggggcaggaacctgaacaatagtgagatacccatcagggaccgtgtctctcagcacctcctctgcacgtagcccatctcccccaggctctgcatttcctgggcttggctcccctctccccctttactcatatcttcattctgtgaaggcatttccatctcttctctttccagacacaatggtctgtcttgatgtaaagtcagtaatctgtcaactactttatggttgctatggtggacaccctggtgaggagcatcttacagaagagggttccagaagggtagagcttatcagggtgagggaggagtgcaacagagagcaggagccagaacccgtgtgctcgctctctcatccacgcaaggaagcagatagaaagataactggaaatgggatgaggggcgaaacccccagagcccacctgcagtgaccacctccaccatggctacacctcccaaaggatccataatccccctaaacaccaataacaaccagggaccaagtgctcagatacaggagcctataagggacatttctcattcagacccccagagagtacaaacagcatcgagcatccctgtcaatcatgcctgggggtgcatagcagggagattgtgtgtgatcataacctcagggacttttataaatatttacaattttgttgtatttttcctattgttcccaacttaaaatataatccaaactgttccgtactgaaacaaatagtttagaatactatagctggatcaactttcccgaaattataattttaaatgctttccctattttaagtatcactgctgtaatatcctggggccaattaatttttataagtgatatgtatctcttacaatcatttaataatatgattgtattctatataaaagcatattcatatgaattcattttctaacttgtagaaacaggtgtggatgagacactcttatgtctccgtcataggtttgaacagttatttattgagagcttattgcagattcctaagctattagatagtcatcgagatagacgtggccctcccacttggaactgaaattcttgtggagaagttagggcaccgccaaatgcataccaaattaagactgataaatgcaataaagaaaagcaacatgaagagacctgggtgaggctatgactagtaacagacaatgtcgattgatctctttgtagcaagcaccgctctaaatacttacaagcactgactcattatgagcaaaggctcatgaagataggcatctgggctgtgataacattgtgtctcatttgcaggtgagaaagcaaagacagggagaagtcaggagcttgtctttgggagagccaggcaggacttaagcccaggcgttacaggttgatgcttttcatcttacagatctggggcagggagatctcagctcagttggcaacgggcttcctgcgaagcctgaggatccgagatcaagccccggagcccactcttcagtctgctgctctgttactgaagtgtcctgaccctttgttctgaatctcttgaagataaccccgagtttggcccgtgttcagtaaaatttttccaggagaaatattcataggccttaaccaccgcccagtgatttagtctgatatcttatgactcaagttcttcaaaggtagattactaaaagcagaccgtggatggggcaagaagatcttatgttgtgttcgccttcccatgggttgccatccactataggacacctatgaaattggagtaaatttatttcatagctttagtgatatcagactgaacttaagaggaacacactccatgactcctgaccttgaagaagtgggtcccagtcgttggagcttcttcagacttttgtgattaattaaaatcttccaaaatggtagggtacctacaggattatttcttcagggccccccccccttcctacaacaactcctatgcagaatgtctgttggcaaacttggccatacttacatttatgcacattatttgcataaattacatttctgtaaatgacattatataaatgtattttacattttctgtagtatatcgtgtatatatagggagagcttcgattctgagacttccacgatttgggggcagaggatcttggtggatgtcatgtagcaggaagggagttagattggtagagtgggtggctctgagatacaccagcttcactgaggtacaatttagatgtcaggaagtagtccctgtagaaatgtgggtcagtgattttgataaatttgtagcattatgggtcatcacagtgattaagatttttatctgtcatcttatagttaacttccatgactctcagtcactaatctgtcctgtgttttgtctctgtgaactcttaaagctatctcttaactaaccattaagaaggggcattttcaggacgttatgtagatggctcattagctaagggcacttgttgctattgcagaaatcccacattcttttccacaccaggccgctcatatcacctgtaactacagctccaggcatctgatgcccttctttatgctcctacgggttacatggatatacatagacatagacacatagacacacacacacagaagcacatatacacacacaggcacnnnnnnnnnnnnnnnnnnnngcacacacatacacataccaaacacaattttaaaagcaaaattaaatcttgtcaaaaagatgttccctgtcttgccccgttttacctagagggtaggtaaaatatgtcttccatgacatatttaacatacttaagccttgttactcatgacccaggaccaacagaccatgcttatcactgcttacctccatcctcacgaggcttccaggaagaagtactccagagcttatcatgaagatatttgtctaatagttcatttataaaagcgtcatccttctgtctacgtctacaggtacaacttaaagaggccattgaagatcttcctggaaaaatggatactgaattagcagaatctggatccaatttcagtgttggacagagacagttagtgtgccttgcaagggccattctaaagaataaccgaatactgatcattgatgaagcaactgcaaatgtggacccaaggtacagagccgaggctaacttggacgtggcccagagccgaggctgacacgaatgtgctgttgaatgggagttctgggtgtggcccacaggaagcatttgatggcactaggggatgtctgtgtgtatcagcccttcatatgtgtggtgcactagtgtctcgtgtgcagagttgtatgttttgtaaaatcatcccatggctgtgcatatctcgttgcaatcataccccagactccagcatctaaaaccttctagctccaagcattcagctgttcagaaatgggatgctgagcttgtatcctaggcctcccaagtgagttagagtcctaaattccaaatctatgtcaagcagtttggaggaagaagaatcatttgcgttgtttctagctagactgtttagattctagctttctaagaggggagggtgtataggagaggttgtgcatgcctgtaacccgagcatctcgaagcctaaagtagaaggctctggggttcaaagccacctgaatggcatagtgtgttcaaagccagcctgagctctctataataatagggatgataataaaggatttttacaaatgttgttgagggtcatgtgacccttccccatctttgctgactcgactgtgacctctgtgactccagaacggatgagttaatacaacagaagatccgggagaagtttgcccagtgcacagtgctcaccattgctcacagactgaacaccatcattgacagtgacaagataatggtgagttctgccctggcagcgcccacagatgctcacaccactgtccgtttatccttccttctaaaaaaaaaaaatgataggaacccccagtaagcaaagccccagctaattcttctgttgccagcagtgcctcaagtgcttatgtatgctttgagtcctactatgcatctgcctttggtgtgctcctctgtctactgtctgttcaaatgtatttgcaggaccatcttaagatgaattacgccccaatgaaatgtcccaaaccaggcagtgcgtcacactattgcttcatactctgttgtagtaggacagtgttattttgtgcatgccacctgtcttagtgtttctattcctgcacaaaacatcatgaccaagaagcaagttggggaggaaagggtttattcagcttacacttccatactgctgttcatcaccaaaggaagtcaggactggaactcaagcaggtcaggaagcaggagctgatgcagaggccatggagggatgttctttactggcttgcttcccctgccttgctcagcctgctctcttatagaacccaagactaccagcccagagatggcaccactcacaatgggccctcccacccttgatcactaattgagaaaatgccttacagctggatcccatggaggcatttcctcaagggaggctcctttctctgtgataacctagcttgtgtcaagttgacacacagaaccagccagtacaccacctttgtcacggcttccctgatcagaaactactgttcctgtggctggagaaatggctggttagtcatgagctcttgtgctgtttagtttttgtcacacactactcttgcagagaactctaacctcagttcccagcacccgagtgtgaaggaagaggaagaggaaggttagtgtggttatcttcgggtttttcctagtttgctctctgttgctctgggaaatgccaggaccaaacgcaccttagaataacggtttatttcatttcatcgtaatactttatggtccatcactgggagaaaccagggcagagactaaagcagaagctgttgaagaatgctcctcactggttcgttctccacggcttgctcagtctgctttcctatacagccctgaccacctgcatgacccgtaggtcctagggatatttcatggggctcagcggcccacaacagggaaggacagaatcttgcagaaatgccaaacaacattctctaactccggccagtcactatttaacccacacgtgggtatgtaggcacgaacatcttgagtttcccttcacctctgttattgtcagtggtgtcagtgtttgccttgctggtgtctcctggtaaatcttcagggcctgttttttccctcattatctacatctttatcctcagtgtggtttgacacgcaggttacaatctggcccttccctcccttcctggcctcaccccactgcactgtccctctctctgctacggaggatgaagccacggtggtgttccccttgtcctgaggtgtgtgtggaggctgctgtctttctgacagctgtgctttctccctcctgagtgttggcagctcagactgaggtctctagcagtgtagaaagagaaatgagtggatttgggtaaggtggcaaacagcgtgactggacttggattgaatgtgggaggagagaggagtccccgtgttggtttccaaggtgatcacgagagccctgggatacatgggtgagaccagggtgaagtcaactcaggaagggctctctttgaacatgtgaccttgcgtttctctgtgacattggccctccccctcagaactccagtgtggggaagtcttcggatcatgtcccctggccatggagatattagagacaaagcaacgtcagaggcgattcccccaagaagcggaaatacgatcagttgagctgctttctgttgtaagaatggcacaggtctccagcttaggggacccaaagacatgcaatctcttctttcacagatggggacttaaaccctgatagatccagccaggatgaagcttcagatgtgttttagaactgatcatcccacaactttcagcttggtagaacaccagtgtgcctgccagttttctgtgactgtaacaaaataccaaaaaaaaaaaaaaaaaaaatcagctttttaaaagatttgttcggctccaaaattggaagtttcgggctgggattctctggttctgtggtgaagtggtgcatcatgggagaatgtgtaacaagacagagctcttccgccatggccagggtgccagagagaaaagaaggagccaagattccacagtccccaaccacattgtcctaaaaactcccaatagactccacctcttaaaggttctactgactctttgaacaaggtagtggtctttggagactttcggaatcaaattgcagtgtgtgttctttgtctaacctttaacgtttgaagcagttttggcttcaggaatgcccattcctcatgtagaaaacaagagttccatcctgttgttccaaagctttacagacataacacatgtcttagctaccgctctattgctatgaagagacaccatgaccaaggcaactcttagaagggaagcatttaacctggtgggctggcttactgtttcagagggctagtccctgatcgtcatgatggaaagcaggtaggcatagtgtcggagcagtagctgagacctttacatcctgttctgcagggttagggttagggttagggtagggcaactggggctggtgtgggctttgaggtttcaaaaataacaaggccacacctcctaatccttctcaaatcggtccactattgagggacccagctttatagcctatgagcttatgggggctgttctcattcaaaccaccacaacctgtcaatcagctgcaaatgtgccaggggccaggggccaggctcagggagtggctaaccaaggaagggatgctgatgagggccataagcaactgcatggcaccatcaagttgagtgattgcaagtgcttaaagtgtattgactagacttccttactctgcctacactcccccaggcagataggaacggttttgtttactgtgagtaaatcaaacaaaaggcttgttgggaaacaactgtggcccaattaatggctttgtttatgtgttggctttccaaagggatttaaaaaaaaaacaaaaaacaaaaaacagttttggttcattaagcaccgttaatgtgttaggctcagaattctattctatgaagatgttctctcaattttaactttattaaacacggcactgtagtgtttatgacagctaatttaatcactctcatttgctcagttgccacaaaacaatggagcaaggctgacaaattagaaaacctccttctcccgatactcagagctatctctgcgttagactcagcttttccccctcattcttgggattagctggatacctggcttctgcgttctcttcagcgcatagcagtgcttccttccagtccctgagctttctgttcacacagctctgggctctcccaggagcaagagcaagagacgcttgactagggtccacagctactaccgctgcctgtgttagaggctgtccctgtctgcaatcagggaattgtagggaattctagagaaccacaggctcagagtctcgggttgtggctccctgttgacaggccacactgtggtcttataatctttacctttcttcttagttgttttcccagataaagtacaacccgtaactatagtcacacacccagcttgaagagcagagcaactcagaactaaccagaccttttacttaagtctctttttcaccttagtgggactttcctttgatgagcctatttggccaaaactaggtcattgaaaaaggagagaaaggggaaaaaatgtcccatcgcaaatatgcttccagtttcaagtcctaaatgttctgggtgcaaataactaacatggcagttcagactccagaaggaggatgtaagcgcgagaggcgaggtgtgaagattaaggctatgttttgctcttgcagaatagaagacacttcactttataaagcaatttgatttcctcccttagtctcttgcatgggagagacctatattttaaaactgcaatcttattttcttttctgtaatgtcaggagtggctatgccctgtggataaactggattaaattattttgaaatggatccatccaattttcacatctgggacaactaccccatctctgcagagatggaggtctgataactcatccttgctaagcttatataactagctgactcacccagtgtatttgtccttaacctgctagacagcactgagcaatttgaggttgttgttcctggagagatctggggttgagcatggctgtcggataagcattaatgtgggatttggtttacagtttatttgggtccgggggtggnnnnnnnnnnnnnnnnnnnnnnnnnnnnnnnnnnnnnnnnnnnnnnnnnnnnnnnnnnnnnnnnnnnnnnnnnnnnnnnnnnnnnnnnnnnnnnnnnnnnnnnnnnnnnnnnnnnnnnnnnnnnnnnnnnnnnnnnnnnnnnnnnnnnnnnnnnnnnnnnnnnnnnnnnnnnnnnnnnnnnnnnnnnnnnnnnnnnnnnnnnnnnnatttacagagcccgtgccttgagtcttcccttttaaactctgtcttgcccacagctgtcggtttgaagcatgtgacttctgagtccttgtcttccattctgtattcccgccatcccacctgacctgctcccagtgcattctggactccttccctcttgacttctcacttctcccaccagtgggcatggcccagctgtgccctgagagtcaagtcctttgactggttttctgccactcagcattgagaacttggtgtgctcagatggtgccaggctttggaaactcagcagtgaattagtgaagtctcgtgagcctgctgtcgggtaggctcatgggataggcgacagagcatctccagtcagggctcgggctgtttgtgtcttgaatgcggtcgtgtcctcccatctgaattttcacgtgtctgatgagcctgtgtgatggtccactctgccgcatcctccctggggaccttcctcccttgcgcagtaacttcttaatgacatggatcactaagtgtgtgataaccgcgctgagtgaacacacagctttgaggtcacctgaattgtcttcccatgcatttttgctcgcatgtaactcgttcattattgatcctggaaaggggaataaaaattgttttttttttcatttggggctatataccatgcacacaggatataatctaagtccccagtgtgattaaaattgcactggactgaacaggtgacaagtttctgataagagtgtgttttcttgagtcaggcagagttatattatccaaatgaggagggataataaaaattgttttcatgtctccttgctagtcctttatatctgataataaatgttatattctggacacccagatgggcatgagtctcagcacggttgtctccggccagggccaagtcacataatttatctgccggtcaatgttcatgtcagatagggagcacgtgaccaaccatgttcctctctgaggagtctcccttcctcagatggtgctgttgtgggatggatggtaaaggcagatgttaccttacttgtcccgagtgtgggggttaacccagatgatggtaaaagctggaaatgggcaaacaatcccatttgatgttacttctcaaggactaagacagatgctgcgaacgtagcttagttggcagaactcttgcctcacgtgccccaagtaatgggtttgttcttctgaacactacaagccaggtgtggtggctcacagctgtgatcccaggaatggtggctcacagctgtgatcccagcactggcgacacaagggcagaaggacctagcaactgcaagtcccagctgcgctctgttactagagcgtgagccagcgtgagctgcagggcagcctgtcctgtggtttgttttggctgtgcttgtttatttgttttattcgtatgctcctgttgcctgcatgattgtctctgtgcctgtggaggccagaagagggcagtggagccaatggggctggagttatagctgttgtgtactgtcatgtgggtgctgggaattaacctagagtcctctggcagggcagcctgtgctcctaaccactgagccgtctctccaggcaggactcttgtcttttaaaaacacaacaaaactattccgtgcagagatttctcttttgtcattaatctcactggaccacgtttttgctggcatttagatatcagagcctgccctgccacccccaactcttagcccattcatttatttgatgtgataacattctggttcctttttaaatactgtgtgtgtgtgtgtgtgtgtgtgtgtgtgtgtgtatccttgcatgtgtgtgtgtttgtgtgtgtgtgtatgcatgtgtgtgtgtttgtgtgtgtgtatgcatgtgtgtgttgtgttactagaaacagaacctaggctgagctacactctaaccctatgataaggcatgtcaaaaccacacttaaaaagcctgtcgtagtttacatttccaaagcgttatcatgcaaattgttcaaaagttctagggctagggacgtatctcctccttgtcgagggtcactttgcatgaattacacctgagctcactctgccagcaaaataaataattatcacaattctgtcatatgcctccaagtgaaaactctcctgggctggagacatggctccgcagttaagagcatatgcagcccttgcagaggacctgagttcgattcccagcaccaacatggggttacccacaatcactggtgacctcagctctcaggagattcagcctctctgacctctgtggacaactacaaatgcacacacacacacatacatggacacacacagggacacataaatggacacacacacagggacacatatacacacacatggacacacacacaaggacacatacacatggacacacacacacatatatggacacatacacacacatacatgnnnnnnnnnnnnnnnnnnnnnnnnnnnnnnnnnnnnnnnnnnnnnnnnnnnnnnnnnnnnnnnnnnnnnnnnnnnnnnnnnatggacacatacacacacatacatggacacatacacagggacacatacacatggacacacacacagggatgcacatataaacacagacacacacatacatatacacagatatacatacatatatacatgaacacataggtgcacacatgcacatggacacatacatatacatattttaaaatatttataaatttaaaaatatttaattttaaatcattaaacttctcaacaaactaaagtacaaattgttgttaatactaagaaggccgagagtacttttttaaatcagtggtctttctgtcacttctgttaccaaccctcctaccttctgagagtgtttgctgactgggcctttacaaatgatggtcacttttgagatctgccactctgagtgtcatttgtgtgtttcaaacccggtgggaaggggaaagacccatcttacattttaatacattcagtaggaagttagacggggagcagttgttataaattcaggctggagagatggctcagcggttaagagcactgactgttcttgcagaggtcctgagttcaattcccagcaaccacatggtggctcacaaacatctgtaatgggatctgatgcccttttctggtgtgtctgaagaaagtgtctgtactcatataaataaaataaatcttaaattcaggcagtctgttacagtcagaggagtcagggtccacctccgaagcgtgattttaagtttactttttgcttctgcagagtagaaagttcatcgttttgtaaagtaagttgactcatttacttagcccttagcaaaggagagacctgcatttcaaaactgtgatttcgcccttcgttaacgtcaggaggagtggctatgccctgtaatgcaatgcttaagtaaaattacacattcggggcctctaaattggcatgccaaattataggacattctaattattatgtggatgtgacagattcaattattcttgaactcttttgagaaagcagcccttagcagcaattcacagtagtaaacaaaagattaacagaaaaaaatgccctttaggggactctataaatgtttccgattaaataccatgggccaaattaactgtaatatccagatacagaaaaacaaccccagccctgcgtagagtttcagtggattctctcgaggtggatttactctaaacacagcccagtgaagaacggagtaagtaccacctacttgggagctgtttccctcggtgggtgcgtgcgtcatttgggccagctgtctccaactctctcttctgtctgaaaccattaaccaaagccactaataagtggacgagcgcctccctccacctctccatccccagagtagaccaatgagctgtccgctggctgcaaggccggcagctaaagggagagagaaggaagccagaaagggaagctcaaaagatacccagccctgtgcccttcagaacgagctgccccgaaggctgtgcgggcttgaggtcatcagaattctgagctcagtgtctctattactttcttagtcttatccagagagaaattagatttctatcgttttcttctgtgcacagcattgctgaagtcgcttgtccgtcatttactggggttgactgtcatcaggcttagtccccgtcatccccaccccccgccccccaccgtcagccccaaagaacctcaggaagcgcatctcccaccagctgctgctcagatcctatccatccagcttggtgatttactctcaagccactgttgcttggctcttctgacatgacccatgttctattaaacaggctgcttctcttcagtccatagattccttagctctgcatgtacgtatatgcaacccctcaaagctcagagtctgagggtttttaaagcactaaaagactccccgagcagccttggcattcgaatgcatagagcaacagacagctgagcacccctgtaataatagtctagaactttcatttttctaacttccctgtaacattaaaataataaaaggtcaggttggcctttgtttgctttgtagctcagggtaatcaaacctttcagggatcctccaggctaccacccaaatagatcgtctgtattctccctggccccgcccctttccgaagcattgtctgtgtgataatatattgctgcaagacattgtgtgtctcagtgggtttttttctgctgatccccaggttttggattcaggaagactgaaagaatatgatgagccgtatgtcttgctgcagaatccagagagcctcttttacaagatggttcagcaactgggcaagggcgaagccgctgccctcaccgaaacagcaaaacaggtgagttggcccagcagccttaattacagtgtgtctcacccgttccctcctcgccatttggcaccaggggtctggtttaaaaaaaaaaaaaaaaaaaaaaaaaagcactgtgtgcccttttcaattataagcctcgggagacaaagcttcaacacgtccagggttgaagtaaggtctaccaggacttggcaggagcccccggggaaggtgtgtgcacatgtgcacgtgcaagcaggcgtgcccgagagggcgtgagccctgacagcagactcattacatttctttctcatggatgcttaacacattgcaatgcaggtattgttgggattcatccaggaagttaggctaaggtgaaaatggaatatgtttgttataaaaaggtctactagagagacgtcaggctgcccctgttcttttccttaaaattcgtaaagaatagtagtatcgcttgctcctgcctatccctataaacctttgttgagttttgggtccaaagaaacctttgtttgtcttctcctaccttctggagaaggtaaatgcgcaagcaggatgtatccagcattgattacacctcaagcaagggcctagtgtgtggagtggaaaggctttaaggacactcagcttgcatgggagctttccgatgtgcacccatgggtgcctcgggtaactgcactctggtctaagggacttactgtcacacagctgtaacagtaggctccagaatacaggtgtggcttttgaccttcatccctctatatttctccgatttctcaacaatataggcagaataaaattgcttggggttgtgtaacatcttaagtatctattaaagacaatagaacaagaaaccacgtgttagtatcctgccagtcgtgggtgagcagtcagtcacacctaaaccctaggctccccttttaccaccgtatcagctcattacaaataggggctggatggagagatggctcattagttaagagcgtttgctcctcagtcatgtgggccagagtttggattccagaactcacgtaacaagcaggcattccactcagacatcgtgtgcacatcccacaggcgtccctaatcacgcagacacacccgacacacgaataagtaaagtcaatttaaaaactggtaagttaatgggttgtgcgtatataaaagtgttgcgttggctaccatgtgcgaagcgtgtgtgagcatacctttagtcatcggtgataacagaccagagaaggccagcgagtgagccacgaaggtgacagcatcggggaacaaggttttgatgctcattagatgcagtgctttgggctatggttcaggttctctgaactttatgtctgctgaggaagctatggcttagagaacagaagggaagaacccagagtcacaaagccagtaagtcactggaagccatgtgttttaaaatgtgcttcacgttgtggacgagatggacgacatcttgaggcggcaaagtgtgtaaggctttttacagagaatttagaaaggaaaacagaagttggaaccgtgttcgggaccaaactttcactcctggcaatggcaagagcctcgtccaggttctccgatgtagcttttgggattaaatgatttgacaactgtttttaataaccagcctagcagataatagatgacaagggtacagaattttttatgtgtacatgtgtgcttctttgtaagagtgtatacatgcatgatattaactataacagttgtaaaactaacatagtaactacaataattatgctacttgtaatataaatataatatactgctttagtcatacctcggttttttgcacagtcagcttccatcaaagctctgtttcatacatagagtttacagtttaggtttgatttcctttttatcacagaaattatttaagaggaacatctgctagtaacataatagctttctattttagttaacatttacactgtcattgttctgtagtaaataatgcttacttctctcctgtcagcttacttgagataattcattctttcttgtgccctggtgccctggaaatctctataagaggttgttttgtgtgctctctcttagcaatgatcagcctagtgatttttccgtccatctgctttaactaaatggtcctctctgtccctacattagtttttctcatgtgactcctatgtggaaatgaatgtcccatacagacagtatatgcctctctttatggctcctctcacattcactttgaatattcttatttttctcaacttgcagatatttatgacttccgttatgagttatactgtctacaattcgagcagtctttctgtgttcgtgtaaggccttcgggttttaattctaggctgctcaacgctgaggtggagccttgttccccttcaccctgtcctcatttgctgcatatgcctttgtcattaataccagaaatgtgccttccatacatgtatggtattgggtttcgttcagagatgcaatcctagcctttctacaaagagatggctttaacccatttgcatttattgaagtcacaggtatgattgatgtctgaaaggttcatcatactgggcattccgtgcttttcatatgtgtgtcacattacccttgtcaacttcataacaccatttctccttaagcttcttgaaatactaattccagttactctgcttgctcactcaatcccgtctccacgtctcactctgtggttcttttcctcagtaagtcatctccaggctgtcccttgtaaaacagtcatttctgtcatcttttcctttctctcttcactgatgacatccgtgagtcagatttcacctccaggtttctcaccctctgcacaggggcttctgctgcactggactgtgtcgcggatgctttcctgaaaccgtcatctgcacgctgagcattcctcgttatcagtttgtcttgatccgtccttcctctcacgtatctattttgccgacctgtcttttcattattgtcaccactttttacttctggataaaatggtttttggtcttttttttttttttttttttttttttatcctaatcacattgctgcaggatggttgcgaataggacattgtttcagatggcagtctataaactcttcctatttctctatatcttagatgtttaaggtgatttctaaaagagtaagactttgctaattcattgctcaataatctaaaaagcaggactaagcctctagtattaacttgacagcagtcccagtggcgggaatctaactagacctgccttacagttgacgtgcacgaggccttgagaatcagtgtgagagagccagagttctgctggtgagcgaggctaccctgacagtctggagccagaatgcagcacaccaagtggtatcttataaatgcagtgtcagtggaagccactgctctcctctgtccacaaggggaaagttgtgtttttgtgatgtagcatgtggtacccgatggacgagtgaatggctggccttggtttcagcccacatcagaggaactctgtgaaaagaatctaagcaaaaggaatgaagaggagcagaagattagcccccagatttgagtatgatggcagcatctctctttccccatgtcctggtgaggcaccattatcgttggccacatgaagaagctgagggagaaaagcccagctaagggttcagagttaccagccagcaggccctagtcccccaagccccaggcatctcctagcctgccttcctgtcttcccgcctcccaggctaccatattaactccgttaacaatgtctcaacaccaggcccgggattctgcaaagatcctctcagaaggcccacaaaaggcaatcagggctgaagcggtttcacgcttctgctctgtagcattgctttccccgcactgaggggctgcctctcaagcagccgtcattagcacacccagcacttagctcggcatgttttcagcctgcagtttgtagccattaattagttcctatgaggtaagtctttgttatctcgtttttacagatgaggcagacagtgtggagggaggctgagtggatgttgcagtatcagctgggtattcaggaaaaagacggagactggttccttttagcctaggctcggcctgcggcttgagggccccatagagaaagtcagccatcttttggcttgatctcatgtagatgctgtgagactgggaatctacaattggtagagtgtctcgcccggcatgcattaatctctgggttcagttcccagcgtcgtattgctttttgtttttaacggacaatagtgatgatggcgcatgcgataatcccaacatgtggaggtggaggaaggtgttgagagttcaaggtcatcctcaggtctacggcaagttcaaggccagcctgagatacttgaaaccctgactcccccaaattaaaaacaaacaaacaaaaatttaaattaaatttagaagaaggtgctcagtctcaaccacaccattatccagaaagtgttataaatgtggtaggagaaattcaagtcagaaacggttctcagccattttagtaaacgtgcgtgtgtgtgtgtgtgtgtgtgtgtgtgtgtgtgtgtgtgtgtgtgtgtgtgtgttgcctgcatggatgtgtatgcagcatgtgaatgcagtgcccacagagtccagaagagggcgtcaggtcctctggaactggagttacaggcagacatgactagccctgtgggaaatagagagtctataggtggagattatgtgaaatttgaatacacagacacaccaaaaagaacaggttctttttatgttcgaaagcatgtgttagggaaatagtctcaaggttgtgctccagtaggctctttcttcttaagcgacatttccttcataaatggaatcttccgtgttggggtctttagggagaagtctgcaagctagtcaagggagggtacttagtggggaagtaggtaccagtgaccttgaggcctgggaagtccctcattcccactgataactttgtggacagcacccacgaatataaatccacagctggaggtttgtaaagtggatccggcatcccgagacccggctcgtgacatgtgtcagctcagagagatgctgcatttttctgttttaaagactcaaacaaaacttttcacattctcctttgaagggaaaaaaaattacatttgaaggcctttttcacgcaaacacatttggagataagagctcacgagtcctgacattatttcattttgtaatacacatctgtcaaggaacccagatatgatacagccgctaaaaactgatgattggggaacagagagacctgacagcatttcatgtcctttatgttccgattacacgtttatcagagagcccgtatctcttctattgcagcttggaattggcagaattcaggaattcaaaggcttggcaaagagctgtcctattatttggtatcatcttccatttgagagaagtcgcctggttgggtcattgtcacagcctttgcttctcttttcattactgtggtccgctatccacagatcgtggctctataggccccacgacggccttgctgcacaaattaagtgccgggatatttcatacgtagaggccagagtttcaatgcttgtcagtcagggtttgtaatatatagggattacaacctgagattagcatccaagcccattgtgctcattttatgcacgaaaatgagaaacttcagtacagatgcccgatcgcctggcctctttgtcatccccccccttcctgtttttaaattatctctgggttttgagtcagtgaaatgattttgcttatcagtttagtggcgtgataaagcatatctgtgaatcaaagtgatcagaagtaaagtggatctccaagttgttgggcattcagcaccgccatgcagagggttttggctggcatttaacagcttttgtgcttgcctgggcttctaactgttcctcaatgagccctgtgatttcctggatggagacagacaggcataacctccaagaaagagaaaggcttgaaaatttactcatgttctgttttttgcctgcctctttcccacaggtatacttcagacggaattacccagatattacattcaccagccccgcggttatgaacacctccaatggacagccctcggccttaacaatatttgaaacagcattgtgaccaccaggacatcatcgtaaagtctgtcttgaaggtgttccccaccccgcccaggggcttgcacttggaggactacagcacacctggtttcctttctttctgccacagatccttcacagacgagagactgttgtctttggatttttccctccgactttactctgtgatttcaggttctaacaacatggcctgtcgttttattttaaaagttcctgctgttctttacaaatccagttctgaggtgcaggccaccaacagcagcgtctaccaggttttgtgccttaacagtctcaagggctgaagcccattcattttataagctgtcaccatgggctgctgcttcctcttgccttaaaagtacactctccaggtgtgtcagggactctgtttacttgaagactgtgtgcagttgccagttcgtctccctgctgtctttgagctaggactcataatttccctacaaaggtctctggttaaaatagaataggtagaattaacaagaaccacaacaacaacccccccaaaaaataatccatataatttaagtatattgctggagagagactatcccaccacctatacatctacaaagatatatgtctaaagttggaaaatcaacttctgctttctcagaatgggagaccgagcgcaggttaggcacccctcccccttgcatctgtgagtccctctgggcggctcgtgtactgatcggatctgtgagtccctctgggcggctcgtgtactgatcggatcggcaccatgacacttcccctagactgtgactcccaaatgcataatattaatctcatttggcttctggtttacagaaggtaaagctcctattggctgtgagccgttggtgaaatcctttcacatcgacaccaaaagctctccccagctagtgaaaacctgaacatcgttagagtcaccgactttacatgctcagaatgctgtgcacaagccacgctttctaaagcccatccagattagtttagctctgaccactaatggcaggtcttaaggaccttgtgattagtcaatcaacaaaccacaacacttcctaggacctgttgtactccgtgtaactataggtctgaatattttctgggtggtggtggcaagggtctatgtcagggttcaagttactaaaggttttactgtcataatttaaaggggactcttcacgacccgtcacaataaaccattctcaagttatctatgtgtgtgtgtatatatatctcaggtttttagactggttgacagaacaaagcctgttttaacagtggaaccttaaagagcacacctacaccaaaccaccaaaaccacgccgagcacagtgactgtttgactcttggtattcagaagtctgtaatgaatgtaattatgtttaggccagtaaatgatgtagattcgtcctttattggtagtcgcagttgatatttcaagagagtgagatgccatgctgacaatattaagatctatttgaatatttagaaatgtcttactgtatatatgtttatgtttatttggtccttagagattaaaagcggtcatacaagtatgttcctatttcatttctatttttcacaccatcacaggacaaaccaaagtcaactgaaataaatgacagtttccatccccattcacagatctgtttgttcgctgagggattgtgatctgactcatgtccttgctggcgaaagccagtgagcttttgtgagatcaaaaggtacctaccaccaccacctgtttctcttggctgcctgggtggaccagattgtctaaagggaggcgtgggttgcagacaacctgaaacagttgctcctgaagctgtcaggtaactctcctttccagaaggggagtattagctcacgccccaaggcctgaacaaacatcaactggatacagtttgtaggttttttttaaaggtaacgtttccctcacactaacagaagaatctattgcctgcctttccatttaaagcactgttgagtgttggttctgagcctgggtaacctgggccagcaactccgtctagaaacttgtgagaagggagattcgaatggcttacatctacaagaaccatacctgtgttgtggggattggtgatctgatttagaaattatcccgattcagagaacaaaacgcctcagagctgctgccatcgagtcttaaaaaccctaagccttctcaggacaatctcagggtccactcagaggtgagcaagaggctaccaagcaagcagcgggaacactcttatgctgcatgaagttatttataaaaacaaaaaaacaactttggcccagtgagatgactcagcggggaatgcccctgcctccatgcctgacagcttgagtgtttcctgaatcccacctggggaaagaactccaatcctgaaagttgacctctgacctccatagcatatgcacatgcccataacacacacgagtaagtgaatcctttagacaaacatcttgatgacatttgctcgaatgtaggcccctatgatctgttctctgccctggtgtgcacataaacacactacccactgtatcagcaatgccatcaggaacataattccaagtatttcagcctgtaggcaactgaaattctcagcagcagtagcaggtggtgggacacagccatgaaaacacctttaactctacaagttttggcttcttggggatacagacacatacatggcacatatatacgtgagcactaacacacctaaaacaaagttagaaagaaaaccacaagattcccacatttgctcagtgggcccagttccctgtgtcaatactgaatactgttctttaaaagagccaggatcaagacagagtcgatggcttccaacacctcctctggaggccctgattaatctcagtgtcccacttagcagcggtggccttcttcaagaagccagcgagataaatctcaatgatccatcacaacagatagaaaggaactgatgattgtaaaagcagcgtttgcttgattcagaagctcatcatagttatttgggggagagaatcacatggaaaccattttaaaattaaattttaaaagcaaattatgttgctgaaaactaatactagcccatgtgaggtagtgcgtatgtcctgttagtagcattttaaggaaggtggggggaggccacagaaagctagggatgtaaaaatgtttcaatttataataatgagtcaattaaaaataatctacatatgcacaccaatgccagttagatgggggaggggagagatgggcagacgaacagacagacggaagtaaacactttctgtaatagaatgacaggagctaaatatagaaggatcaatggaaaaatacctgtggacccactgttgtcaacggtaactcaaactattccaacactgtatttgctaagtgaacctcgtatggatattcaggtagaaataatgtctatgtatgcgtggaatgtgtcatcccatagtaagaggaaaactttatgtttaccatgcaaaatctgacagacaccctcctaaccaggcagccaggtccaacctaaggaaggaagctgaagtcagccatagtgggacaggcagcagcctctctcttgatgtgtgcagccgtgtttataccatctcacgtctgtgacacacctgccacaagcatgatcagtccaacagactcaaagtgaggacactctacagcacacccggtctgtgctccctgaaacagcctgtagccattagaggtttcagaagtgttccagtttaagtgggaacttaagacatgctaattaaatacactgtgatcctggattaaaaacaacaacagtaaagccagtaatggcagttggtaatatcagggtgagagctgtacagttgctaatagagttttaacagtgttaaagcaactgaatttacttcttacgatgtgctatgcaacaaaaatagccttagggaatgcacactggtatggttatcggaaagggcctatgatatctgcaaatgtgattatgtgcatatgtgcatatacatagtatatgtatgtgttctatatgcataggatagagtatatgcatatataacacatccatgattgtggagtgaaatactagcaggagaggagacaaacgaaggatacgaaatttcagtgagagcccagattaaagacacagacaagctgactacgttactgaactgttttacactctttgttcagaaggcaaagccagaagcatcttctgcaaatagaagcctctcagaggtgggctgagcgacccctggctctgtgggtatcatataagtcattaggagatggtttaatattatgtctatttagcagcacgagtagcagactctctcctaaggcctatgacctgtcttagctcaacaatggtgcttcctaaatatgaaaaggaactagttcttttcatcaccttgcatagattcctggctaacccatcagactgcaccggtagtgggctgtgtaaggaagaaacatcacagctttattgctacatacctatgttgtgatgatatacgatagtatacaagcacagaggagaaaggctgagtccgggcttccatgattccaaacaggaaacgatgtcttggtgatttgagatcacattagaaaaaagtaccaagatgtctgatgtaataaatggagctccacatctctggttactttaaagtcctactgaaacctaaagggtgtttgatgttgtttttattaatagcatttccaactgtttttctttattgcgttattggcaaatacaatgaacacagaggagctgccatctccaatctgcaaggattaaaacagaatagtatctcttggcaggaatacagcagagtccacgctttcaccttgagccagacatggtggcccatgttcttacttgcagcacctgggaagcagagacagggcactatctgtgactacagcacagcgagttctaggccaggcaaggctacaaccctatctcagtcaccaactaaacaacaaacaaacaaataccagcaaaatgctggccaagttgtggaaggtaaggagaggacctgcgtgctgtcctctgtcctccacatatgtgccacatacatggttaagcatgtacttgtcttgcagaggacctggattccgtttccagttcacatgtccatgtggttacgactactccaggggacccaacgcactcttctgacactgacactacagacactgcactcctatgcacacacccacatagagacatatatgcacacactaattaaaaataaaacaaacaaacaaacaaaaaacattgctgaagagttaccagtgaggaacacaacctattttatgttggtgcaacaccatagcagccacaatactggtctaggacttaacagtcatctataaaatagtggctcctaaattgtacaatgtatccagacttgttgccacacgtctttgccggaggttcctaaaattacttatcaggcaaagggaaatggctaggcaaatttttcctgggaaacatggtgtttccccagatcaaaataatgccgagctgctgatttacatgggtggggcagaaacaagtggcaactagggacctgaaacaataatctcattttggtggaatttggactttcaagttgttctcaagctacgaggctgctggggtgaagactacattaacaggccagccatcccagccaccaaggcagccacagcaagaagacaggacagctgtccatagacttagccctttaaaaaaagactatgttgtcattagaatggaataaattatgcaaattatgggtctcactgactttttttttactggatattttatttatttacatttcaaatgttatccccttttcctggtttcccctcaagaaagcccctatcccattgcccctccccctgattctctgagggtgttcccccacccactcacccactcccacctcccccaccctggcattcccctacactggggcattgagccttcacaggaccaagagtctctcctctcattgatgcccaacaaggtcatcctctgctacatatgcggctggagccacaggtggttggtggtttagtccctgggagctcttggagggtctggttggctgatattgttgttgtagacttagccctttaaaaatattatgtcatcattagcatcgattaaattatgcaaaaaaatgttgttaccatagaataaattatgcaaataacaggtttcacttagacattttcatgaaagcacattatgtagtttgatccaactcaccctcagttaccctctctgtttaaaaaaatgattatagattatggatttgctgctttcttgtttatttgttttcatttatttatttacagagctgggaatcagactcagagccctatgcttgctagttaaggactccaacacagcaattttttcacctgtatatattcagggggtcgggtatggtgagctgatacatgcagactgcatctaatgatgaaatcagggtaacgagcctttctcggtctagcgttggtccccgcccactcttctggagttaaaagtgtgcatttagacttagctaacaagacttggttcagatgttgccaattgtgttagcaacacccaaagcatcacagcaggaggcataggaaggagtgcttcctgatctccatcagtggggcgctgatcttgacttcacctatgtgtctgtcatgttgaccttggcctccatgttgctgctgtctttggtcttcatggtagacttggaggtcaggaggacttcacagtggagcagtaatagagctggtttctcctggcctccaaccatccaagactgtttccagagccacagggtctctgctggcacgtgacactcgggttcgcttttccgtggaatcctgtcaacagcagctggggctttgtggcctttgcttggttggcttcatctctgggagggaacgaactttcttcaccttcggtaccactgtcacctaaaagctagttttctttctcacttatgatcccacttctctaagttatagtatcaggaccccagcgtaaggagttcctgacccttggtgttcagatggagatagagcttttgagagaaggtccttatggcagtcagccatgcctagtaaagacaattggctcatttaattcccacttcttcagggctaagcttccagttggcaagccacaaaactgcctgtgtactatgcttgaaatagtcttgagaaactcataaaggagccctcactggccattcatgctgatgccttgtgtctttgagttcctttaaaagttcttattgtttgtctatatgagtatattcttggcatgtgcactatgtgtgtaatgcctgtggaggccaaaagagggcatcatcccctaggactggagctacaggtggtttgcgagccaccacgtgggtgctagggatcaaaactcagttctctggaagagcagcaagtgctcttaatcgctgagctgtctctccagttctttgagttccttttcaaaatatgactgaatttttatggagataaaaagtataaagttgctggtacttcagtgtgagagtttatcaatgctttcttcctagtgggaacagcaatagatgccacacgtggttttagagtgtaggtgtttttgacccatccttggaagacctgacatgactcatcaccaagaaagctacttcaacaacctgatttcataatatcaaatcacaataaggaaattgccagtacccaaaaagagattaatagataggacataagaagttgaagcagcctgcacattatgctgccaaatacataaatttaaacactatgcatctgtccatcttgtctgttaattcgaacaatctctcaagtccacactggctgttgaagaatcttgaggataagaacaggaagttaccgtctgggagagaaggaagtttggagaagcaggctgtttggtaaagacaggtttgcttgcttaagtggccaaggagatttgagggcagccagttctcactcagcacaggcaggctaaacatggtgtctggaccataatagaggaataatcaatgttggttgagaaaaaatgaacggctttcatactgagtgttagtggaacaagttcatttctgcctgttcgtgaagctaatccttattttaggtcaacaactgtcaccaacattatcaacattaaacaaaaaattcagatgtaatttaaacttttaggctgatgattaaagagcatgcatttacgcatccaggaaagctccatgacattgattccttcctgccgcgttttcctcttctaaggtaggaagtgtctgctagctgcagtgctcagccataatgctttctagcccagggcaagaacacgactagcagccaccaatcacaaggctcgataggtaaatatatcaaccacattaacgaaatgttgagaccaatacctgtgaaccacccccttaactccaagttgaaatcacattaatgattacaatgaatcttttacaaaacaaacaaacaaacaaactccttccttaatatctggaagtcctgattccatttttcaattcctttttaagatttttagattccagaacttgccttttcgtcctgaatcagggcagcaccgtgagagccccacagccttgcaaaggagggctttgtgttcacaagaacactctaaaggacaaagattgaccactccttctagcctcacaaatggctcagaccctgggttactcgtgctagtagtactgctttacagtgtacccttgcaaggatggaatcaagcaagaggcccatgtaggtgtttgaagggggctggcaccatttgggcgggctcttctgggttcttgaaccttgaatgtgcctctttctacctgataggtgttaaaatggtgaagatgtggagcagggcttgagagcttgtgtttccaaactgccaagcaaggctgctgctcaaggtttgtgcgtcacactcggacagccagtgtctgaggactaaggcctagatgggtgtgttcttcgggctctcggaaatttctcaccagagtaaccagccagcacctaggagagctggtgggggtcctctaaacagcaggacccagagtggaggcttcttgttaggaccacagactggtcctagccccttctttgctagaatcacccttcttacccaggcccgccctcctccttcttcgtcccccctccccctcgtgccaatgtgctgttcccataatgctgggctccgattctcctccacccgctctgccaccatttcatcctttgatctcccacccactcgccccaaagtcaagtttctcttggctcctttctcggctgctctcccactccttcccacgcttctctcttgcgacacaaaacaaatgtaaaataacatttcaaaaatattaaaaatcgatgctgatgaaatcgcggttttgttttcttggaatgggaggcaacaggtccaacaatcgcagacacagattggcctgcgctgtaccattgtttctgggcagaaccctatctgttcacccatgacctgaaatcagaatttccaaacagaaacgtttgccggattagttagggcagactaagtttttctcccataattttattttgacaagaccatgaaagctgctatcgcctcatctaatggaatcaaacaggctgctaaaaataacccttgcaagcttttattacgaacgggaaacacctcctcctcccagcttgcgactgtgatcagcttaatccttcaactttgctgcgaatatttgcactgctctggggttcttttctttccaaggctggtttgctctgtttggcagagttatttgaacaggtggctttgcacaccctatgctaatggaggcttttgtcttccttcaatcagcagagggagccgttctagaaagaaacggttctttgatgctaaactattcacacctgtttgattatcacctcgcgaatcacaataccaagccaggcagaactttctctaactggacaccagaagagatgcgatctcctttgcatctccaagagcatcttttcgagacaagcatctccaagagcatttttcgttgcttagggcaagcgtctcctgtttccatcaggcaacggaaagggcattaaggaaggtttgggggtgcctcgtttgtaaagagcaggatgctaggcttcagaggactcaccagacctagttctccggcttgagcccgcttccccttccctttcatccggggacactttcagcgggagctccgggcagacagtgcgcgcgcgcgcgcgcgctaggtcggggatgcgcttggcgcgcgatcacagggtctccggggacgccccgcgcgctccctggctgcagatcacaggcgccgccctcggccggccagcacgggaacccgcctgctccctggcgcgcgatcacaggcaccgggctccgcaccctgagggccgggaggtggcacggccccagcccttgaggagagcaatggctggcgcgttcccacgggaggcccaggaccaagcagggacttctaccttctctaaaaagtgtcttccacaagtgacaaggtggcaccagcaagggcggtgggcgttctgcctctaaagcagctttgtagacacacctgattctggctacgttggtgctgcttgagtatgaacttttggtctggtctgaacgtagccttttctagaactatgtttttgcatctcatgaaaagaatgaatgaaataagtgccttgcagtgggcagagactagcttggacacagtttaaggagatcagacttgtaggtgtgctcatgatgatagtcagccccacttcctacaggcctgcaaaggtgccttgtgtacgtgcatgcgcatgtgtgtgtgtgcgcgcgcgcgcacgcacgcacacgcttatacacttgagttttgtgcagatgaagcccaaaagctgacatatactgttatctattattactctccgtctttttcagtgaggtagggggtctctcaattaaacccagaatttccccagtctggctagtctgtgcagtcagtttgctctggggattcttgtccactcctgctgcgctggaattgcagggaggttgccgtgccaactaagcatgtctgtggattctagagacccagagttcaattcttatgtttgctgacaagtgcttcaactattagcatcttctgcagcccggattcgatttcttcttttttctttctgttgtgcttgtttgctttgttttgtctttgggacacaattttagtgtgccactatgaagaatggatccaaggaggacaaacaagaatccgaaactgggggagggggggggggagggggaaggatggagagatggctcagtggttaagagcactgactgctcttccagaggtcctgagttcaatttccagcaaccacatggtagctcacaaccatctgtaatggggatcccatgccctcttctgttgtgtctgaagacagtgacagtgtactcacatatatgaaataaataaataaatcttttaaaaagtcagaaactggtgtaggttaaagaataaatcgtgtagaggttgaaaatcatagcaaattgtagaaacttgaaggactaccatgataattgaacagatgca

SEQ ID NO: 1151 - DNA, 5550 bp, Mus musculus
atgctgccggtgcacaccgaggtgaaacccaacccgctgcaggacgccaacctctgctcgcgcgtgttcttctggtggctcaacccgctgtttaaaactggtcataagcggagactggaagaagatgacatgttctcagtgcttccagaagatcgctcaaagcacctcggagaggagcttcaacggtactgggataaagaacttctgcgagccaagaaggactcgaggaagccctccttaacaaaggcaatcataaagtgttactggaagtcttacctgattttgggaatttttacgttaattgaggagggcactcgagtagttcagcccttatttttagggaaaattattgaatattttgagaagtatgaccccgacgactcggtggctttgcatacagcttatggctacgcagcagtgctgtccatgtgcacgctcatcctggccatactacatcatttgtacttctaccacgtgcagtgcgccgggatgaggctgcgggttgccatgtgccacatgatttaccggaaggcactccggttaagtaactcggccatggggaagacaaccacaggccagatagttaacctgctgtccaacgacgtgaacaaattcgaccaagtgacaatcttcttgcactttctgtgggcagggccgctgcaggccatcgcggtaaccgtcctcctctgggtggagataggaatctcctgcctggcgggcttggccgttctggttattcttctgcctctgcaaagctgcatcgggaagctgttctcgtcactgcggagtaaaactgcggctttcacggatgccaggatccggaccatgaatgaagtcataacaggcatgaggataataaagatgtatgcgtgggagaaatcgtttgctgacctcattgccaatctgagaaagaaggagatttccaagattctgggcagctcctacctcagagggatgaacatggcgtcgtttttcatcgcaaacaaagtcatcctgttcgtgaccttcactagctacgtgctgcttggcaatgagattacagctagccacgtgtttgtggccatgactctgtacggtgccgttcggttgacagtcaccctcttcttcccgtcagccattgagagagggtcagaggccatcgtcagcattcggaggatcaagaactttctgttactcgatgaactaccacagcgcaaagcccatgtaccatctgatggcaaagccattgtccacgtgcaagatttcaccgctttctgggacaaggcactagacagtccaaccctgcaaggtctttcctttattgccagacctggtgagttgttagccgtggttggcccagttggagcaggcaagtcgtcgctgttgagcgcagtgctgggtgagctgcctcctgccagcgggctggtcagcgtgcacgggaggatcgcctacgtttctcagcagccctgggtgttctcgggcaccgtgaggagcaatattttatttgggaagaaatatgagaaggagcgatatgagaaagtgatcaaggcctgtgctctgaagaaggacctgcagcttctggaggacggggatctgacggttataggagaccggggagccacgctgagtggaggccagaaagctcgggtgaacctggcacgggccgtctaccaggacgccgacatctacctccttgatgatccgctcagcgctgtcgatgcagaagtgggcaagcacctgttccaactgtgtatctgtcaggcgttgcacgagaagatcaccattttagtgactcaccagttacagtacctcaaagctgcaagccacatcctcatactcaaagatggtgagatggtgcagaaggggacttacacggagtttctgaaatctggtgtagattttggctccctgttaaagaaagaaaacgaggaagcagagccctccacagccccaggaaccccgacactcaggaaacgaaccttctccgaggcctcaatttggtctcagcagtcatccagaccctcgttgaaagacggggccccagagggccaagacgcagagaacacgcaggcagtgcaacccgaggagagccgttcggaagggagaatcggcttcaaggcctacaagaattacttctcggcgggcgcatcctggttcttcatcattttccttgtgctgcttaacatggtgggccaggttttctatgttcttcaggactggtggctttcccactgggcgaacaagcaaggtgcactgaacaacaccagaaatgcgaatggaaatataacggagaccctagacctcagctggtacttaggaatttacgcaggtctaactgcggtcaccgtcctttttggcatagcgagatccctactggtgttctatatccttgtgaacgcttcccagactttgcacaacaggatgtttgagtccatactgaaggctcccgtgttgttctttgacagaaatccaatcgggaggattttaaatcgtttctccaaagacatcggacacatggatgacttgctccccctgacgttcctggacttcatccagacgttgctcctcgtcgtaagtgtgatcgctgtggccgcggccgtgatcccttggatcctcataccattggttccgctctcagtcgtcttcctggttcttcggagatacttcttagagacgtcacgggatgtcaagcgcctggaatccacaattagcggcttccgtgctcactcaacattgcctgttctgctttgcaatccagaggcttggttcttgttcctgacgacatcgagatggttcgctgtgcgtctggacgccatctgcgccatctttgtcatcgtcgttgccttcgggtcccttgttctggcgaagactttgaatgctgggcaggttggcctggccttgtcctacgccctcacactcatggggatgttccagtggtctgtgcgacagagcgccgaagtagagaatatgatgatttcagtggagagagtgattgagtacacggacctagagaaggaggcgccttgggagtgcaagaagcgcccacccccaggctggccccacgagggagtcatcgtcttcgacaatgtgaacttcacctacagcttagatgggcctctggttctgaagcacctgactgcgctcatcaagtccagggaaaaggttggaattgtgggcagaaccggagctgggaaaagctccctcatctcggccctcttcaggctgtcagaacccgaggggaaaatctggatcgataagatcttgacaaccgaaattgggcttcacgacttaaggaagaaaatgtcaatcataccacaggaacctgttctgttcactggaaccatgaggaaaaacctggaccccttcaatgagcacacggacgaggagctgtggagggccttggaggaggtacaacttaaagaggccattgaagatcttcctggaaaaatggatactgaattagcagaatctggatccaatttcagtgttggacagagacagttagtgtgccttgcaagggccattctaaagaataaccgaatactgatcattgatgaagcaactgcaaatgtggacccaagaacggatgagttaatacaacagaagatccgggagaagtttgcccagtgcacagtgctcaccattgctcacagactgaacaccatcattgacagtgacaagataatggttttggattcaggaagactgaaagaatatgatgagccgtatgtcttgctgcagaatccagagagcctcttttacaagatggttcagcaactgggcaagggcgaagccgctgccctcaccgaaacagcaaaacaggtatacttcagacggaattacccagatattacattcaccagccccgcggttatgaacacctccaatggacagccctcggccttaacaatatttgaaacagcattgtgaccaccaggacatcatcgtaaagtctgtcttgaaggtgttccccaccccgcccaggggcttgcacttggaggactacagcacacctggtttcctttctttctgccacagatccttcacagacgagagactgttgtctttggatttttccctccgactttactctgtgatttcaggttctaacaacatggcctgtcgttttattttaaaagttcctgctgttctttacaaatccagttctgaggtgcaggccaccaacagcagcgtctaccaggttttgtgccttaacagtctcaagggctgaagcccattcattttataagctgtcaccatgggctgctgcttcctcttgccttaaaagtacactctccaggtgtgtcagggactctgtttacttgaagactgtgtgcagttgccagttcgtctccctgctgtctttgagctaggactcataatttccctacaaaggtctctggttaaaatagaataggtagaattaacaagaaccacaacaacaacccccccaaaaaataatccatataatttaagtatattgctggagagagactatcccaccacctatacatctacaaagatatatgtctaaagttggaaaatcaacttctgctttctcagaatgggagaccgagcgcaggttaggcacccctcccccttgcatctgtgagtccctctgggcggctcgtgtactgatcggatctgtgagtccctctgggcggctcgtgtactgatcggatcggcaccatgacacttcccctagactgtgactcccaaatgcataatattaatctcatttggcttctggtttacagaaggtaaagctcctattggctgtgagccgttggtgaaatcctttcacatcgacaccaaaagctctccccagctagtgaaaacctgaacatcgttagagtcaccgactttacatgctcagaatgctgtgcacaagccacgctttctaaagcccatccagattagtttagctctgaccactaatggcaggtcttaaggaccttgtgattagtcaatcaacaaaccacaacacttcctaggacctgttgtactccgtgtaactataggtctgaatattttctgggtggtggtggcaagggtctatgtcagggttcaagttactaaaggttttactgtcataatttaaaggggactcttcacgacccgtcacaataaaccattctcaagttatctatgtgtgtgtgtatatatatctcaggtttttagactggttgacagaacaaagcctgttttaacagtggaaccttaaagagcacacctacaccaaaccaccaaaaccacgccgagcacagtgactgtttgactcttggtattcagaagtctgtaatgaatgtaattatgtttaggccagtaaatgatgtagattcgtcctttattggtagtcgcagttgatatttcaagagagtgagatgccatgctgacaatattaagatctatttgaatatttagaaatgtcttactgtatatatgtttatgtttatttggtccttagagattaaaagcggtcatacaagtatgttcctatttcatttctatttttcacaccatcacaggacaaaccaaagtcaactgaaataaatgacagtttccatcccc

SEQ ID NO: 1152 - protein, 1302 aa, Mus musculus
MLPVHTEVKPNPLQDANLCSRVFFWWLNPLFKTGHKRRLEEDDMFSVLPEDRSKHLGEELQRYWDKELLRAKKDSRKPSLTKAIIKCYWKSYLILGIFTLIEEGTRVVQPLFLGKIIEYFEKYDPDDSVALHTAYGYAAVLSMCTLILAILHHLYFYHVQCAGMRLRVAMCHMIYRKALRLSNSAMGKTTTGQIVNLLSNDVNKFDQVTIFLHFLWAGPLQAIAVTVLLWVEIGISCLAGLAVLVILLPLQSCIGKLFSSLRSKTAAFTDARIRTMNEVITGMRIIKMYAWEKSFADLIANLRKKEISKILGSSYLRGMNMASFFIANKVILFVTFTSYVLLGNEITASHVFVAMTLYGAVRLTVTLFFPSAIERGSEAIVSIRRIKNFLLLDELPQRKAHVPSDGKAIVHVQDFTAFWDKALDSPTLQGLSFIARPGELLAVVGPVGAGKSSLLSAVLGELPPASGLVSVHGRIAYVSQQPWVFSGTVRSNILFGKKYEKERYEKVIKACALKKDLQLLEDGDLTVIGDRGATLSGGQKARVNLARAVYQDADIYLLDDPLSAVDAEVGKHLFQLCICQALHEKITILVTHQLQYLKAASHILILKDGEMVQKGTYTEFLKSGVDFGSLLKKENEEAEPSTAPGTPTLRKRTFSEASIWSQQSSRPSLKDGAPEGQDAENTQAVQPEESRSEGRIGFKAYKNYFSAGASWFFIIFLVLLNMVGQVFYVLQDWWLSHWANKQGALNNTRNANGNITETLDLSWYLGIYAGLTAVTVLFGIARSLLVFYILVNASQTLHNRMFESILKAPVLFFDRNPIGRILNRFSKDIGHMDDLLPLTFLDFIQTLLLVVSVIAVAAAVIPWILIPLVPLSVVFLVLRRYFLETSRDVKRLESTISGFRAHSTLPVLLCNPEAWFLFLTTSRWFAVRLDAICAIFVIVVAFGSLVLAKTLNAGQVGLALSYALTLMGMFQWSVRQSAEVENMMISVERVIEYTDLEKEAPWECKKRPPPGWPHEGVIVFDNVNFTYSLDGPLVLKHLTALIKSREKVGIVGRTGAGKSSLISALFRLSEPEGKIWIDKILTTEIGLHDLRKKMSIIPQEPVLFTGTMRKNLDPFNEHTDEELWRALEEVQLKEAIEDLPGKMDTELAESGSNFSVGQRQLVCLARAILKNNRILIIDEATANVDPRTDELIQQKIREKFAQCTVLTIAHRLNTIIDSDKIMVLDSGRLKEYDEPYVLLQNPESLFYKMVQQLGKGEAAALTETAKQVYFRRNYPDITFTSPAVMNTSNGQPSALTIFETAL

SEQ ID NO: 1153 - DNA, 246940 bp, Homo sapiens
  misc_feature (1)...(246940): n = A,T,C or G
agcacagttgacccttgaacaacaagggtttgaactgcaagagtccacttatgtgcagattttctttttttttctttttctttcttttttttttgagatgaagtctcactctgttgcccaggcaggagtgcaatggcatgatcttggctcactgcaacctctgcctcctgggttcaagcgattgtcctgtctcagcctcctgagtagctgggatgtgcaccgccatgtccggctaatttttctgtatttttatagagacagggtttcaccattgttggccaggctggtcttgaactcctgaccccaagtgatccacccgcctcggcctcccaaagtgctgggattacagacgtgtgctgcgcccggcctacgtgcagattttcttcagcctcttccacctctgagacagcaaggccaatccctcatcttcctcttcctcttcagcctattcaatgtgaagatgatgaggatgaaaacctttgatgatccacttccatgtgtatcttctcctcaatgattttccacaatgattgtcttaatggcggtttcctttctctagcttactttattgtgagaatgtagtatataatacatagagcatacaaaatatgtgttcatcaactttatgttactggtaaggcttccagccaacagtaggctattactagttaaggttttggggagtcaaaaattaatatgtggttttttggttgcacagggggttggcaccccaatccctgcattgttcaaggatcaattgtatattattctctgtgcttcttggtgcgcaaacttaaatgagtagcttcagatgctcgctttgttaaggagtcttattccttagtctggcaagtgcttatttgagcttggaagcaagagagaactatgtcatctcttatgagagatgaagtttaatcgtttggaagaaagcgcttgatttgaacaggcactaattaatgtccagattttttttttgatttttcttttttctttttttttgagacagggtctcactctgtcacccaggctggagggcaatgagacgatcacgtctcactgcagccttgacttcccaggctcaggtgattctcccacctcagtctcctgagtagctgggactacaggtgcctgccaccacacctggccagttttttgtatgtttttgtcgagacagggttttgccatgttgtccaggctggtgtcaaactactgggctcaagcaatcttcctgcctcagactcccaaggtgttgggattacaggcgtgagccacagtccccggccaatggcctgattttcagaggatagtcaacatcatacactgatgggctcagaaggatcttggcaacaatgagctctgcatctagcaggtggccacacgggccttgctgactatatagtatggcatctctggctagtcgtcagatccttcacttgctagttgcaatgaacaatgctttcatctccttatgagtcagccgcataacttgggctgcagaaataattaatatcctactcacttagccgggcatgatggcatgcacctccagtctcagctatgcgagagggttgcttgagcccaggagtttcaatgagctatgattatgccgctgcaccccagcctgagtgacaaagtgagaacctgtctcttaaaaaaaaatcttactcacatttcttcattttattctgttactaaattgtgtacaaatatgccaagtgcatctttttttaaggaagaagactaagatggctaatcatgcacaatggctgtagatgcttggtactggttgtcgtgtgggaaagtgctgggaagatgggattataaagtgagggccctgtgaagaagtgaaaggcatggattagctggtgggagaacagggagacaagaaggctgtggatgaaccagagaaggctttgaagctccgtagtaggaaatctctgaggtgcctatggcatggaaggacccatgttgaacccagagtgcaggtgtggaggggggttgggggacccggaagagaggtggacagggtccacattgcctgttgcttaggttgacatagaaacaacaggtagtagagtgaagcgggaagggatgagaaaatgggctttgagcgtgttttaggaagggaggaacgttagaggaaaaataacagaagatcacagctttacaggtgccacctgagtttaatttacttggtcatgggccgagataagctgggttgggaccatgttgagaacacctgtggtgtgggtgctctaccctcacgcgagatccattccagcgatgcctgtgtctggtgatcgttgaactttagtgtctggtgatcgttgaactttagggcatggagaatggctattttggactacagagaatgggaggagattgaagaaatcaggtgtgtcgggctccccttggagccaggccatgggaaactttgtaaggacagaggccctggtgaactttggaaggattttgttttcttttaggcattcaggttttggggtctgagcagaattgctggagtgttacacgagaagtgtgctggcggtgggctacaccattccttcctccccagcactcagtcacttacctacgagaaaatgcacatttgcactggtgtgtgtccttgcaccctctttctgaaacccatttgcagaatccaggcctttaggaaacttttgctattgcagacttatttatatctgtaaattatttaatatttatatttgtaactgagaagttgatatcatggactcgtaatggattttggagtttaaatatgttaaaataggtaatttttacaggatgtgttcattcacgtgacaaatctgggtgacttctatgtgcccagcatgttgtaggtgtgggtggcttagcagcaaacaacacagaaaaaccccatccttgtggagcctagatgcctccaggggaaaacatgatttcaaaaaaagtgaaatataatagcccttctaatgttgacaggtgctgagtagaaaatttaagcttgggcaggggcagagggtgagccttatagggtcaatgtgactgtttctggatatactttgcatgttgaagtaataggacttggatggcttagatgtgtcctatcaaagagtgacaaagaagggatgggctgcagggtcacctgaaggttttcttttctttggaaaatctgggcaaggggaaagatgtgacggctgataactgagagggagaagcctgggaggagcaggatttttttgtgggatgaaaaggtgttctgtttggacattatttagtttgatatgcttatcagacacccaagaggaggaggtgttgaatcagcagttggttatgagtcaggggtattgtatgtgcccttaggcactagcaatgttttttgtgtttttttttaagcaaaattatgaccatcatttcagaaaactattttatatatataaagaggttgaaagcttattaagactagatttagaaaaaacatataatactctgagaaattctgtgtgtagtgtcaggtagaaagtaaagtgttaccagttctgtttataaaaccccctttaggccaggcgcagtggctcatgcctataatcccaacactttgggaggccaaggtggggggattacttgaggccaggagtttgagaccagcctgggcaatataatgagactctatctttacaaaaatatacttaaaaaaatagccgggcatggtagcacgtgccttgttatcccagctacttgggaggttgaggtgagaggaccgcttgggcctgggaggttgaggctgtagtgaggtatgattgcgccactgcactccagcctgggtaagagagtgagaccctgtctcaaaaaaaagagaaaaatccactttatacaaaaatttgcatgagagtattgcccacatttgaaggaacacttaaccttccatgtattatgtttatatggagacttgtctctgaagatggattttggagtttatattaaatttgtttttgtttctgtgttgttttttttttgatggggtctcgctctgtcgcccaggctggagtgcagtgtgcagtctcggctcactgcaacctctgcctcctgggtttaagcgattctcctacctcagcctcccgagtagctgggattacgggtgtcctccaccacgcccggctaatttttgtatttttagtagaggcggggtttcatcatgctggccaggctggtctcgaactcctgacctcaagtaatccacctgtctcggcctcccaaagtgctgggattacaggcatgagccatcatgccaggccaaatttggggatttttggaggatgtgctcattcatgtgacaaatctaggtgccttctatgtgcccagcatgttgttggcttagcagcaaacaacacagaaaaacccagatgctctggggggaaaacatgatttttaaaaaaagtgaaatgcaatagcctttcaaatggcgacagatgctacagagaaaatttaagcgtaggtaaaggcagagggtgagccccatgggagggtcagtgtgcaaaatggaaactcagcatcatttcttcaatggagctgttttggagaaagcccggggcagtcatggttggccgtgcactaacctttctatcgtggaggcgtggggaggggagaggcattctcaggtgttttccttagaaacacaggaaggtgaggaagaacagtggaaactgaatgaggaataaaaggcattcagatttaaagataccaagattagaagttcagagtctagggtggtcaccagacagcagatactgtttaaaataagtgttgaattcctggcaccagaattctagtcctttactattttgtggcttccaaatagagaaagttcatggaaggaaacataaaggtcatctagttaaagtcctgtgtatctatttcactctctttatagatgtacagtagtccccccagtccgaggaggcaggggaactaccctcattgaagaccctcacctcagtggctgcctaaagccgtggatagtgctgaaccctactgattttttttcctacttacacatatctttgttggtttgtttgttttgtttttgagacagtctcgctctgtcacctaggctggagtgcaaaggtgcgatctcagctcactgcaacttctgcctcccagtttcaagcaattctcctgcctcagcctcccaaatagctgggatcacaggtgcctgccaccacgcctgggtaatttttgtattttagtagagatgggttttcaccatgctggccagtctgattttgaactgctgacctcaggcaatccacctgcctcggcctcccaaagtgctaggattacaggtgtgagccaccacacctggccctacttacacatatctatggtaaagtttaatattataaattgagcacagtaagagattaacaatgataataaaatagaataattacaacaatatactcttcaccatttcgttgatagaaggttcactcttaaaccagatctcagcaacctcagcatacaatttttttttccttttcttattggcttgagaaccttaaccttttcacataaaggaaggcctttgcggcttctccttggcatatccaaatggctagcatccttgtacttgctctttgggggccattattaagtaaaataagggtgacttgaacaccagtattgtgatgccatgacaatagatctgagcgcccagggtggctactaaatgactaaaggtgggtgacgtctgcagcatggaaatgctggacagagggaggattcccatcctgggtgggtttgtgggagatttcatcatgctactcagaatagtatgcaatttaagccataggaattatttctggaatttcccatttaatcttttcagtcaactgtgggtaactcaacctgtggaaagcgaaactgtggatatggggggatgactgtatagcatcgagagacacaagtgaactccttcagtagcctgccacaggggatttcattcaacctgcccttagccttccttgttctctaaactctcagcttagctcacagctttgctgtctgcaggtctgagcacaaacctgccttctcgcttacctcctggatcccgtgattccaggcctaagttcaggaggtatacagcagagaggaccttccctccctagtctcttcttttagtattgtttatttctaataaagttgggggaaacttttcttctttgatagactataattttagggttatgcaaatgcataatccattgaaaaaggttttattaggcttggcttctgaagaatataaaatattgaacttgtccattaaagagagaacaatcttgattcaatgagtatcaagtaatgaaataattattttagttccatcatggccagttgttacaaaaaggtcaggaaagaggaggagaagagaaatagaaagggcctttaaggaggcagagagggctaaaagagagctgaaaggggacaaaaggagagagggaaagagaaagtgaggggatttaccaaagataagttagcttttatttcctcctttacttgtggctatggggaacatgaagctcatagaaactgaagactcaggtcagggtcacagagacagggagctgggacctgtgttttccctcttataccacattaagaaaccactattggccaagcttggtggctcatgcctgtaatcccagaattttgggaggccaaagtgggaggatcacttgagcccaggagttcgataccagcctgggcaacatagagagacctggtctctatcaaaaataaaaatattagccaggcacagtggcatgtgcctgtactcctagctacttgggaggtagaggtgggaggattgcttgaattcagaagtttgagactgctgagctctgatcggatctgagtgagctctgatcgctccactgtactccatccagcctgggcaacagagtgagactccatctcaaaaaaaaaaaaaaaaaaaagaaaccagtattcagaacttctcaaatccttgggggaaaaaacaacaaaaactaaatgccaccaccaccaacaataaataacaaaactctctactaacccttgtctaagactcctgcttgctggaaatgatgctgggggttgtgatcctggggtggagaatgtctctgtattgctgaagctgatggcttcctgtgttgggcattgagcacgactatgctatattgagtttgtattgaattttaccctagatcattgctcaaggtactctacccatctgtcttattcaataatacaatcattcattctttccataactgtttattgagtatctatcacataccaggcataatggggattccaaataatatggcagtagtcattgccctgaaagcattgtactcctagtaggacagttaggagggaagcgatgctgctgtactaagtattgtgggagataagggggagaagagactaagtctgaggagagaagggctactggggcagaactgggtggaggaatggctcatttggcagtggtctggaattgttgactagaccccctcagggacacattggtattaaggagccaactgacttagatttccatgtataaagtccttacatagatggtcaaagataatttagtctcttgtcaaagttgacttttgtcatcaggcaaaagcctttagctcttgctggtacccacatcttttcagcccagctttttgagatctgggcaatgagagagagtaggagggtccttgttaagtccttactgatttgtgtcatcctctaatagaagctttgggtctcttctgattgcagatactttaactcaacagtggcatccctccttgttaatatttctaaatgttatgcagttaactgttcagcctgtggaacagagttaccattctcactttccttaattttttaacttcctggagccagttttattccctgattaaaaaaacctctttagtccaaaaagacaccagtgaattttacttagaagtccttgctgaaatatactgtatgaggttctgctggaagggaggtctcgggcatgcagaggtcatctcaggcatgtctgggaaacccacctaagttgaagctggactggttaggttacagtcttctggacacattttggaggaggtgaggagaaagaggtgagttgatgagttcttcttgccattgggttaattagaattgctagtttggatcagcaggaggtttccggaatcctgaacataacttggatacccctgcagtgtgtgctccaatcttacggggcattgaaagcccaccatttcactgcaggcagaagccaccaggcagtgggttccccatgggaagggcttcctagattagacaatccccatgttaaaataaaacatgcctattaaaggtgacacatggccagataagacagccaagatgaaagaagtttgtgtaattgagtaattgcatctatcaaagttattagaggtttccttatagggcacaaatatgtttcttcttcttttttttttttttagacaaagccttgctgttctgctcaggctggtgtgcagtggcgatcacagctcactgcagccttgacctcctgagctcagtccatcctcccacctcagcctctggaatagctgggatcacaggcttacaccagtacatctggctaaattttaattattatttatattttttattgttttgagatagtctcactctgttgcccagactggagtgcagtggcatcgatctcagctcactgcaacctctgcctcccaggctcaagtgattcttgtgccgcagcttcccgagtagctgggattacaggcatgtgtcatcacacctcgctaatttttatattttcttactagagatggggttttgccgggctggtctcgagcttctggcctcaagtgatctgcctacctcagccacctaaagtgctggggttacaggcatgagccactgcccagcctttttctttataagtttttagtagaagtgggcatctcactatgttgtgtaggctggtctcaaactcctgggctcaagccattctccctcctcagcctcccaaagctctggagttacaggtgtgagccactatgcctggtgcatgttaattattatcatttaatgattaatgatgttaattattatcatttaatgattaataatgttaatatcatttaagtgattcctaatggatgaccattttgatttttctttttttttagtaaaaagaatctcaaaatatttgaataagttctttctgtcctctgcaagattactattttgtcctttcgtaactaataaataatttgtacctagataattttggattatgtaaatgtcccatcaaaccttcactgactggttttagctcccattgaaaatgttttctaacctcatcattctttatctgagagtttttccttcttaccccatttatgtctcagtaaggattcgtggattcttttgttattcagtgggttagaattcattgctgtcatgatttatttggatgcttccattatcacagacttgtctagtgggaccccgtcaagctgggtcctctgttctttgggcccatcctcttgattccttgaatgtttccttatcgtatggtatctcatgggccatctttttctgccccagcctttgaatcagctatttcttcaggaagctctggttccttttagataataatggttttggaaaccaagatctgggcaccagcatgctctcagctactggtgtgtcattgcttctggggcctgtctgtggatagagctagggactgtgtgtgtgtgtgtgtgtgtgtgtgtgtgtgcacatgttaacttttctctctctagctctatatattcatatctgtctgtctatatatagctgtatgtattttaaaggtaagtttaagcaaaacccatggaggtaggagtctacttaaacacggatgtgtaattctggatatatgtctcttttctcttgttaacaggtggctcaatcccttgtttaaaattggccataaacggagattagaggaagatgatatgtattcagtgctgccagaagaccgctcacagcaccttggagaggagttgcaagggtaagtcggaggcagtaaagtgggcattaaggaagcgtgggtgtctgtgtgtggggagtgggttttgccttcctgggtcctgtctggagcctccgtttacccttaaggtgaatatgtgtcaccttcctcaggctgcccctaggctcagcctaccatggtggcctgggggaaactcctgtttcctgtgcctccgtagaggtcaggggagccagcaccaaaggcccgagatgcctgaggtctgtccctctaggtggaagtgttgtggttggaggaggttgtctggcttatctgtgctactgatggggcttcaatccagtaaagcttggcagtaacttgtttccccagacttcccctcaaggcctgtttttctgatgctccagattctgtaccacacataaccttcaggagccctgggagcaattagtagcatttatgaaatcgtcacaaaatgccctgtcttaaatgcatacctgtcactctgccatctcccctgttttatattgtggcagggttcactcttatttacgaagctttttcctcattgtaggttctgggataaagaagttttaagagctgagaatgacgcacagaagccttctttaacaagagcaatcataaagtgttactggaaatcttatttagttttgggaatttttacgttaattgaggtaaaagcttttacataccatgaattgtttttcaggacacatagagtaaatgtgctcgccattgactggtgctgtaatggatgggggaacagaagggagaagtggccagatggggtttgaaggtattttaaggtctaaggattaaacatgtctaggaagtattaggtagttagttcagtgagcgtatttatccaggtgaatacttaagtgactgaagttcaaggtcattattgtttttcttgtaaccaattaaaatgcagtgtcatggaagaagagtattttattctatggtaggacaatgttggtgctcggtaaatgttttaaatgctaagagtcactcctggtcaaaagaggatcctacagccttgaggagtgcgtgccctgtggtttagaggaagtgattttggatcggagcccagaataatgtaagacattttacaggtgctcaacaaataattgttcaccaagccaaatctgataattgctcttctggagaggtattgtcacctctcccctctcggggaaacagagctgagggccttgcacctgggctggcggtggtgccccagaggctggagctggctgaagcacccaagagctaccccctcccagtgggcccaggtgctgggagccaaaatcccctctgggaagaaggtccgaggactgtgcacccaaggggattcatcacacccatccggtgtgtcttccttgttgtcggagtggattgctggttggaaggtagagtcttggtgcctggccctgcagagaatgtataaatggacattccatgaaaaatcaaagacagccagaagggcaataacctctgttaccccgaagggcctctcttgagatctgcagaaagacagtgttctgcctaggcacactgccaggtagcttgtccgttctggtctttggcctgctagaggagatgcagagggtcctgctgggtgacttgtgtcctctgtgctaccttagggatgtcagtggtccattaaagttagaggggtggatgttgctgttgttacaaaagggtggctttaaatgcaggatggggagttgtcacggtgcattttgttgggaatgaggtgggtggggggagggggttggtttgtatgtgggggggtttgctcctgttgaacatgctttttgttgtggagggcacggtgggcagtgggaggcaggtaggtgagctctgccctacaccagaggaatctgtcagacaacaggggactggacggtcctgggagatgaatggtctcattggtgacaaaggtgttttggccagggtgccagatggtgaatgccacctttgagagggtacccgccctgcctgcatgctactgtggctttgtggcagatggggtggacatgcagaataaccggtggaactgacttgagggtggaagagggctaggagcccctcaggttctcccagcccctcttcaacctgtgctggggtgtcccagcgatagtgtttccacatggccccgatcagtttcagttggaaagaaatagaatgacaagtcggtgtcaatgtggccagtgtgtgcaggatttcctggcccagtttggctgtgcaacctcagagaagttgtctggtagccatggagcctctgtaagtgtctaaggctcatgccaggtgtctggttaggtgtagtgggaatcaatggcctcacataggtttcgaggcatgcctccctcagctacttccatttctctagtttccctttgtcaccagctgcttatgaaattgaaaacaggatgatttagaaggaactgagcttgtcatgctcagggctgtccatgctgtcatgggctgccagccacttggggtggggtctctaacccacagatggtgactggactacagtgagatttgggtaagcttttgggagaagcaggcacagaagtagaggctgtagaagcgtgaatttctcctgagacttgaggacaggccccactctggtgcaaggagcatggtaatctttactgctggtgggcatgtgggaaggggcccggatcgaggggagctttaatatgggtacagttggtggagagctggtcttttagcggggtggttattgggcagtcatggcagaaaagtagggagtggaggacctggcaaatatgggggctcatgctcagtactgcttagcagcagcagtgctagtagaagcagcagcaggattagtagtggttggtactcagtagtagtagtagcagcagcagtgatagtagcaatagttgtaataatactgacagtgagtacttgaaaaatactatgtaccaggaactgctatgatttctttctttctttctttctttctttctttctttctttctttctttctttctttctttctttctttctttctttcatgttattttattttattttgttttttgagatagggtcttactctgttgccaggctggagtgcagtggtgctatcttggctcactgcagctttggcctactgggctcaagcagtcctcccaagtagctaggaccacaggtgcacgccaccatgcctggttaatttttgtatttttgtttcactatgttgcccaggttgatcttgaactcctgggctcaaatgatcctcccaccttggcctctcaaagtgctgggattataggcaggaatcaccatgctcagtcagaaggcattcttttaaccctacttttgggaagaggacactgggtgccatgtagttatataatgtgcccagggccacacaaagtgtaaatgacagagcccagattcagtctcaggagcgctgacttagggacctaaccatctccagactgtcgtaaaggtgtcttgagaactctgtcttcagagtatccagcacatgcttcttgaacttggcctagggataagtcagatgctaagagctccctggagcagtggggcatggctgtgggaaatcagattggggattataaattaccctaggttcctaggtgtcctggtgccggaaagtcaggtgacatgctagagagtggctggggtgctgggcaggtcagagcaccaaggtacattcaggttgaccacgaactctttttttttttttatgttttcgtctgaggtggggtctcactctgtcactcaggctggagtgcagtggtgtgatctcagctcactgcaacctccatctccctgggctcaagcaatcctcccacctcagcctcctgagtagctgtgactataggcatgcaccatgcctggcttattttttgtatttttagtagagatgaggttttaccatgttgtccgggccggtctagaactcctgagctcaagccatcggcccacctcgccctcccaaattaatgggattacaggtgtgagccactgtgcctggctgaccaagaaccctttagaaacctgtctcccactgagtaccatcctccacatgtgtgaggcgtgcagccctgctgacccaagttcatcaacatccacgctgttaagacaccattcccagttgtctcctcctcggatggacgagggggaagcttgtggtcttgcatggtcacgacattgactgatggtctgggcagatgtcaagttccctgtttttacttatcaaaggctctgggtttcttgcatagcaatgatatctctgcagtttcagaagcctttggcctgaatcgtgaagtgggtgtgcagtttgcttggcaaggatgaagaccccagatgagtcactagtatggggacagctcttctgtcctggtatctgaaccctcccactagcaaggtgggccccaggtattagggcggcaggctaaggtgttaagatggacccacacagtgctggcggcaggcacctctcatataaagtggagcctgggcttttcacaagagagcacttgttggtcctgtgtttacaccaatatcttggtggtttatggtataaaattagacagtagtcagttattctttagaggatcatggtgactagtggatgatgctcattttaaccttgtgtctttaacataataactggtagaacttttagttccgatgcagtgaagttcagggagctaaagctcttcccagttcaactcaaagtaatccttggatttttttttttcttttccttctagcagtgaaaacagcctgaattctagtataaatactattgttttcccagccttgcctattgacacttggctgttttggagaagttggagagaaataatttcttaagatgaaggtagtgagtgtaacatctcaaaagcatttcaggtgttgttttgggttttcaatcattaaagctatttattgaccaggcatggtggcttatgcctataatcccagcattttgggatgccaagggatgattatttgagcccaggagttcccagctttagtgagctatgattgcaccactgcactccagcatgggtgacagagcaagaccttgtctctaaaaaagaaaattaggccaggcgcagtggctcacgcctgtaatcccagcactttgggaggccaaggcgggcggatcacaaggtcaggagttcgagaccagcctgaccaacatggtgaaaccccatctctattaaaaatataaaaattagctgggcatggtggtgggcgcctgtaatcccagctactcaggaggctgaggcaggagaattgcttgaacctgggaggtggaggttgcagtgagctgagatcacgccactgcacttcagcctgggtgacagagcaagactctgtctcaaaaaaaaaaaattatggagttagaacaaatgttagtttcacagttgatttaatgaagatgcttttcattttttggtcttgtgtctgtgctgcttgtggatcttcgtattttggatagtggaagctctaaacttaacctagcatttagtaaaaagcttctgtgatgactttcaggccttttttaacccacttatgccggaggttgccaattttttttgtgtgtgaaagatcagaccttggcgatgaggttgaacagtagaatataaactcccacaagcttagtgttccaataatggaatgctaggcacagatgggttaattcctctggttacagaacaactgtgcagtggatccataactccctagccatatactcttaactaagctgaaggcaagcagggccttccctgggtactaatgatggcaccagcaggaagagagatggtgacaccagtttgcggggagtctttgaggttggaatttcaaagtaatgcaagtgagattaggaacgattgtcagagttgaggaatgattataatgcccagagaaacaagtactagtctaatggtgaacatggtgctcttccaggcaaatgctaattagaacagaacagcccgcgaatttccagcacatctgtcccctatgtgcacctccatggagactgtgatggggactggagactgagcaagtatccacccacttagagcctgcagcgggggcaggaagaaggaggagcttgggaatcctctgtgtgggccaaaccaggacacaggcagcttctccatttgtatctatgctgcttgttggtctttgtattttagatagttgaagattatctaaatgtttctttgagaaatgagatgtgtatttttttttttttttcctgagatggagtctcagtctgtcaccaggctggagtgcagtggcacgatctcggctcactgcaacctctgcctcccaggttcaagtgattctgctgcctctgcctcccgagtagctgggactacaggtgtgcgccaccacacccagctaatttttttgtatttttagtagagatggggtttcaccatgttggccaggatggtctcgatctcttgaccttgtgattcacccaccttggcctcccagagtgctgggattacaggcatgagccatcgtgcctggccaatgaggtggtttttaataacttcaattctacatttcttgttcagctgcctgacatgagggccaaggccaagcctcatgtggtattttctttctttggttgttttgttttttgagccagagtctcactctgtcacccaggttagagtgcagtggtgtgatcttggctcactgcaacctctgtctccttggttcaagccattcttctgcctcagcctcccgaatagctgggattgcaagcttataccaccacatgtagctaatttttgtatttttagtagagacagggttttaccatgttggccagcctggtctcgaactcctgacctcaagtgattcgtctgcctcggcctcccaaaatgctgggatctttcttaggtttttaaagatcatttcaaaaatataaaatataatagaatactaagcctctctctacccctaagccagcttcagtaactatcaactcatgaccactcttgatttttatgaagccctgctcactgccccctctgaagatgtgtgtgtgtgtgtgtgtgtgtgtgtgtgtgttttgagatggagttttgctcttgcccaggctggagtgcagtggcatgatcttggttcactgcaacctctgcctcctgggttcaagtgattctcctgcctcagcctcctgagtagctgggattataggcatctgccaccatgcccgggtaattttgtatttttagtagagatggggtttcaccatgttggccaggctggtctcgaactcctgacctcaagtggtccacctgcctcagcctctcaaagtgctgagattacatcgcgcccagccgcgtgtgtactttctaattgaagaaaccgtgttgtttgccctgcacggattcccagggtctagattgggctcattgcatatccctcctcccctcttgtgaccctctacatccttgcatgctgtatcatttaacatgtccatctggtaccagaagttagtagttagatctagaagcttgatgtgattcaggttttattttcccccctcctccctttggcaagagtactttgtaggtgagggtgtgtaccacctgccacttcgagatacctcgcttaggtctggttatgtgtgtgtggtatttggagccattcatgatcattgcttaagatgcattaatttgttaggagtttgcaaagtggtgatattccagttcctcatttattagctgaaatatttgcataaagagaaactttgccattatcaactctttgatactctgagttacagtacacctataggaaaggcaggagaaatgattaattttgttatttttttttaaaccgattttcaaaataatgagtgattctccagcattttcctgtggagttaatggattttttgttattgcttgttctgtatattttgatgagtatgattgtgagctcatggatttaaacagttctgatgtgctgttcattacagttatcatccctgtgccacgctttggctgtctttggctagtgggagtctatcgaagttgggccctgagtcttttgaatgtatactattagtctttgcaacttcctcattttctggtatgacagatgttttaggctccctgaacagtttttgccccagctgtggaatcaaccatttttcctagcagctttaactccttttatgtttatatttaaagataaacatatcatgaatttatgtgggtatttccaaatcagattcaggacaccagtgttttgacttaatctctttactcttacatctgtatctcttttctcccttcatctgttcttttttctccctagcctaatcccagctcttgatatcaacatacttattcatttattttatcttacagtatcaacactattacccataatatgatttctaaaaataatttaaattttttttttttgctgtttacattgtccttagggtagataataatgtgcagggactatcttttcaaactattttttttacagtcaaataaactagttaaactattttgtttaaagttaaaaaaacaaattatgattcatccttttgtttggtaggtacagtctttactgaacatttaattttccctgctgtgcagaatggaagatcttagtttcatcactgaaatctcagcatccttttttcctaagggattttcttggaagcctaacatttggcagcagttctgattaaaagccctttgtggtcttaaaagttcttcagggtcaggcacagtggctcacgcctgtaatcccagcactttgggaggccaaggcaggcagatcacgaggtcaggagttcgagaccagcctggacaatatggtgaaatcctgtctctactaaaaaaatacaaaaattagttggtcgtggtggcatgtgcctgtagtcccagctactcaggaggccaaggcaggagaattgcttgaatctgggaggtggaggttgcggtgagctgagattgcaccactgcactccagcctgcgcaacaagagtgaaactccatctcaaaaaagctcttcacagcgggtctccagcccctccagactcagacacagagagtgcaggagaggagaatagtgatgtgtacaggcattggtttctacactccagaatcttccggggatggggaactcaggccctaccctgatcaattggccctaaatgtgggggatgggtcctgagcatcagtgagcgtgtaagtctcctgggtgattctaacatgcagtcaggactgcactgattcagagaggacttcaggtatatctggagtcttaatggttattatttccccagattcaccttttttcttccttatctctggatctttctcaaccctagttttgtcccctgttcccccatttctttttttttttttttttttttctgagatggagtcttgtgctgttctccaggctggagtgcagtggcgcgatcttggctcactgcagccttacctcctgggttcaagggattcttgtgcctcagcctccccagtagctgggattacaggtgcgagccaccatacccagctaatttttgtgtttttagtagagatggggtttcaccatgttggccaggctggtcttgacctcctgacctcaagtgatctgcccacctcggcctcccaaagtgctgggattacaggtgggagccaccgcgcctggctgtatttccccatttctaaaacaaactgcttactcatttttccacagctcactcttttctgcttgtatttttcactcaaacatcttctttggtagcttgtttctatttcctgtgttttctttccttcccatgcaatctggtatggtgcagttgggcaaggaatatctgaagtgcgtgggggagcaggagcatggaggccgcgtgcccgctgggcctagacatgtaatgtgtcactccaagaaagcaagggatggggctcgaatgtcaggaggctgagtaccaaatactccattgagaagtatctgccttcaagtactctgggactccagtagaacctgaagtatggaacattcaagtatcctactggactctcaaaaacctccatggtttcacagtcgaggagaattcttgtgaaggagtaaggactattcttagcttgtttgtggaaagactcttcaccaggtcatagattggttggtctctaaggtggagaatttatgtgagttacttttgaccttggtactgatatttagaaagtttaaatttggttagttgtaattttgataatgagtattttcccagttgtttcgtttcttattagttgaaggttaagatggagaggtccgtggaaaagcatggaccaaaaaccagcattactcaccgatgagcccatttgcttgactggattattaaatgctgtctctcggcagggaaatctggacaattaggtagtcgtgacctacctgccttttgcattctctttcgctgggtttattgcatctgttatttcctctgggggtcatccctcttgccgtttgaatcatactcacctacggctgaaatggagaagcgtgtaacaggtaacagtgactcccagggactgtgagaagtttcaggaacatttagaaaggcaaagagcactgagcatctggctgatagcccaggtgtgtctgctgcggccctggttgcccttggcactcctgagccagggctgcccatgtgtacagtttggccgtcttgcttcttgatgtaaacgtccagattttcatctcagtaaactctaaacagtccgtgttatgacccattgtactgggggctcttccataaactcttagtgccttttgaatgattggccatgctggaaatgtaatggtgagcctctgcattcttgatatctgatcatcttattcataattcttcaactaaatggtattttctgatttctgtatcataggggaaaacttccatgacctcatggaaggcagtgcagttggtgaagtgtgtgagagagagtgtgtgtgtgtgtgtgcgcgcacgcgcgcgttcacatgccgagacaggcgtgttgggatttaatatcatgacccatctgagggatgggaatgtcttctgtaaatatcctgatcccgtgctagttgtttgggatgaaagtgtgtgttaattttgtttttgttttttactgattgttcttctctcacttcagatggacagaaaacagctatcaatggcaaacctgtcaggtgtttattatgtctttgttaagaaggagagattgcttaaaaggaaaagttgtttttcaaggttaaggtcttgaaagattttcaaacattttgcattttgtcttttgagaagtcaggaggaaatgatgtcgagggcctacatgtttacttttggtgacctggatttgcaatgagtgtttggttttctttgttgggggaaaagggtcccttacaacgggttcgagagggaggaagtaggttgccgggtgaagtgctcatttggcagggagggtaaaggaaagctcctttgcttacctcaaaccgtggctcaagctgcgttctgctgtttctttgcctttagtcttggaggttaaaattgcattccctacatcttgttcagaaggtaagcccgcatgcttcccagctcattggtgtgggattttaattttgccttggggaaaagatgattattaatattgcttcaaaaccaggaccttcaaaatatggctgataaagagagccactgatgacattccctttgagctcaatttctgctgtgtttaatttttgactccacactacctgagccaaagtggcagttcttctgggcacatccgggcttgtagggggcagaaacatactgaagcaatgtcctgtgggtccaagagcctggaatcctcccaagtctggttcttttccccactccaactgaagctggacttggtggtgttagatctaccgactcttggagtttggattgggaaaaattggagagtttgattttctgatctgggtttgtgccaatatctccattcacaaaggctcttaactgtgaagaaggtggcaagagtgctggcctcccatagacgagcctgtgggctgggatgtcaagggtacagaggaagtggggtgagagctggggtgtctgtttgtaagcaaattccttactcctcttgggccatttttttccttattcaccttaggccaagacttaatttggtagtttgccaagtgtgctttaaagccctgtttgtaatacagagcacccacagtgtaccaagcacaatgtactaaaactttattgactttgaaattagaattttgatttcaggttaaaactcctatcggcttgtcttaaagaagaaaacagttctgcttttcttttagatgagtgatgaatgttgcactttgaaaatataaaacttgtgttaagaaaaaacgagcctaggtgccgtggctcacatctgtaatcctagcactttgggaggctgaggtgggaggatcacttgaggctaggagttcgggaccagcctgggcaacatagtgagaccctgtcttgaccaaaaaaaaaaaatttagctctacatgatggtgtgcacttgtagtcccagctacttgggaggctgaggtgtgaggattgcttgagttagggagttcgaggctgctgtgagctgggattgtgccactatactccagcatgggtgacagagcaagcaatatctgaaaaaagagaaagtaaaaagaaaaaatggtgtggtctgtatgtctaattaaaggcttttctttttcttcttttaggaaagtgccaaagtaatccagcccatatttttgggaaaaattattaattattttgaaaattatgatcccatggattctgtggctttgaacacagcgtacgcctatgccacggtgctgactttttgcacgctcattttggctatactgcatcacttatatttttatcacgttcagtgtgctgggatgaggttacgagtagccatgtgccatatgatttatcggaaggtaagtgacattcagcattaaacatgtacctcacctgaagcatcagaagcattctgaggaagttttatgtaaattaaatactgcataaatagccactgcactccagcctgggtgacagagcaagaccctgtctctaaaaaaagaaaaacgaagaaaacttctgtaaatagaatcatttacaccttactagagaagcttgctatttgcatcaggccaatgttttttttctttatgcaaaattttccagtgtataatgaaagttttctactgctgtcagggcatggctgcctttgataacaggctgttgcagaatactaaatttataatgaaatctaattaaaaatatcaaattggttttcagtgtttctttgcctcaatctcatagttgtatttatggaaatttttgttgttgttcattaaaaccttcacttacatcacagttgtattcagaagtgaacttcagtgaaattggatctatgaaattaaatctaggagaaaagaatatatttgagaaagggaattcttatattttttaaatgaaccatttagtcatattccatataattttcttaactgaagaaaaatgtaaatggaatccacgtcggatacaggctttctttatattctaaatctagttgtggttgtttttaatggtatttaagaaaatagttggatgtttgggataacactttgaattgttgattgtttttcacaattttggagagaacttatagtgtttctattttatgttggttttcattcaaagtaagtttttacattaaacagttgtcccttggtattcgtgggggattggttacaggacctcttgaggatacaaaaaaattggaggatgcttaagtccttgatataaagtggcatagtatttgtatataacttattcacaccctcccatatatggcattttatttatttatttattttaaataatttcatcttttattttagattcaggggtagaggtgcaagttttttccatgggtgtattgtgtgatgctgaggtttgggttatggatgatcccatcccccaggccatgagtgtggtacctgataggtagtttttcagcccttgccgcattccctctctcccaactctagtagtcttcagtgtctttgttctcatctttatgtccatctgtacccaatgattacctcccacttataagtgagaacatctggtatttggttttctgttcctgcgttaattcgcttaggataatggtctccagctgcatccacgtggctgcaaaggacatgattttttttttttttttatgggtgcactcccatgtactttaaatcatcttggtttacttataatacctaatacaatgtaaatatacattatataatgtacaatatacaatgtacattgtgtacagttatataatgtacattgtaaagtgtacattatttaattgcacattgtaaattgtacattatataattgtacattgtataatgtaaatatacattgtattaggtactataaacaaataactgtttagggaatagtgacaagaaaaaaatctgtgtgtgttcagtacagacacaatcacctattttgtttcccccaaatattttcaaccccaggttggttgagtccagggatgccaaacccatgcacaggaaaggctgactgtattttctttcccattagggcagtaataatgataagacctgatttgatattttcttattttatttgtgcttttgtattgagatatgccataaataataccatagtttgctgtggtcttaactgttatagaaggagtgggatttctggttgctttgctgagaagttgccatagagatgctagtgtcaagagctaaagaacttgtcattaaatcagtcctggatatctctttgtcctgggccgtttttttaagccatttaaatttttttttttttttgagatgaagtcttgctctgtcgcccaggctggagtgtagtggtgcaacctctgctcactgcaacctccacctcccgggttcaagcgattcttctgcctcagcctgccgagtagctgggattatggacatgggccaccacacccagctaatttttgtatttttagtagagacgtggtgtcaccatgttggccaggctggtcttgaactcctgaccttgtgatctgcccgtctcggcctcccaaagtgctgggattacaggtgggagccaccgcacccagcccatttaaatttaaagtattcttctttgacctcgttgtcacttatccagagtgtccgtaaggtgtcctccccaagtcttcctttgacatgggggaatcaatcttataattctgtgaatcctggaggcctcgtgtcttagtgtctatggtacagtataacaggtatgcccggattcctcatgtgtgacatgaaaatgataacaagggcttgtacacannnnnnnnnnnnnnnnnnnnccaccaccatcaccatcatcatcagcagcagcatcatcatcatctgtgttattctcctgtactctcttctaccatttaggagaagaatactcaggtttttctataaactagctagatttttgtctttcaagatcatacttctaataaattcataaaaattttcactaacactccacttggcaaactttaaaaacaccctacatgaagtccggtttgaggtagtggttcagtaaaacacagctctttgtacaagtgagatactgttcacctgtttttcttcctcttttccactaacgctttggaaaatagcctttgggaaatctgatctaactcggcagacttgcttgcctgcatgtaaacatctcccaaaggtattaatttgtcagcttgattatcttagaagtattgtctctttatgaagtcaaaaattgcttgggttaaaccataagacttaacctgaaatcccagaaacgtgggaaagacgaatatcctcatgtcctgccttgtatgtggaaacatgcccaggtgaagaaataagacacttcctcctcacacgtgggctgcttccttggggcagaggctggctctgcagcaggactctgaaaggtccctctgcgacactggcagtttccactgaggcccccatatcctgattcccggtctggcagaaatcaggttggctgttgcaaatggaatgactgccgagcccgtcgtcgacatttggtattgaatgatcttgcaggatgtctgaaaatgactcgtcatttatttactttttcacagctttggtaaaattactttaggcttttcatcattaatttttcttcttattgtaataaaatatgcataacataaaatttaccattttaactctttttaagtgtacagtagtagttcgtttgcattaagtacattcacatcattgtgcctcccaaccccaccatccatcgacagaatttgttcatcttcccaggtggaaactctgtacccattaggcactggtgtccactctcccctctccacagttgtcagccttctgctttccagctctatgaatttgatgactctaggtatttcatagaagtagaatcatacagtatttgttattttctgtctggctcacttcatgtagcataaggtcttcagggattatctgtgttgtattgtatgccagattttaattcctttgaaagagtgaataatattccactatttggatatgcctcattttgtttatccattcatctgccaccggacatttgggttatttctgccttttagctattgtgaacaatgctgctatgaacacgaatgtacaattatctctttgagtccttgcatttagttttcatttatttttatttttgagatggagtcttgctctgtcacccagtcaggagtgcagtggcatgatctcagctcactacaacctctgcctcctgggttcaagtgattctcctgcctcagcctcctgagtagctgggactacaggcacctgccaccacgccaggctaatttttgtatttttaatagagacagggtttcaccatgttggccagactgatctcaaactactgacctcgcgatctgctcaccttggcctcccaaagtgctgggattacaggcgtgagccactgtacccggccgagtccttgcttttaatacttttgagtatatatttatttagagatggagttgctgggttatgtggtaattctgtttaattttttgaggaaccatcatactgtttttcacagtggccacaccattttacattcccacttattctttaataatttgtctgtttaacttgagaactaaatgagatgtttttatgaatcatgactagctttaatttggattgatggctccaagggtggtctgttgaaatggttcatggtggtttgttcaggttcctcggaactctgtgttatttcttacaacttttaccaaataaaaagactgtgcagcacaggctgtattttaagtgaggtcaacagattggcattaagaatatgggctcctcatggcaatagtgtgctgaacattgtacttgctcatgttagaatgtcgtcagtcacaagtcatattcccagcatgggttcgtataacctctgcagtggggacagtgccttatctcctgtttttactttttagctatctgggacacagaagcaggggatgtgtccatcttcaagtctcaaggggttacttctatagcttagagcacatgagttggggagttggctccatgttggaggaagagggtccctttagtcaaactgagcctggattaaggatagctgaagatcttcagccccagccaccagtgagactggatctcccatttgcccttgcctaccttgacttagggccaggatagatctgagcctgaatgctaaacatctgaatgctagacctacgatggaatggaggacagtttcattaatcaggatgggcttgtcatcccagcttttgtattatcaaatacattaggcatagagacttttccttaagatctgtggcctaattagctcaagatttcttgactttgtatctaatttgaagaaccgtggtggttcctgcagtgggttggcttctgagttgtggattttgatgttgggttggcttgtcctgaatgccaggtaaagctatagcagtacctgagcctgcttgctggtgctcctctctgctgtttgcagacttttttgcagaattgagaaagtttggggaaactttttattctggataaaactgctcgtcttcactttctttagagttactctgaaggatagtttgaggtaaagtatctgtctgtccttcatcttccaccttctaaggtgtgttgagtccctgcagactttctagttttcctttatcatttattacagatctgccctagaagaatatatggaatatatgtatgtagtgtatctcagaggggtgctctctatagatttctgtgttgagaaatatttgtagttaccctaagtgtattgtttaaccatttatgtgatactgtgtggttctctttttagaattctgtaacttggggggaaatgcatattccctgtatgcagggaatatggatactccaggaatacatgtatatattctcttggatgctccatccagagttcatattatcaggtactcttcatctttctgggggaagaattcctgtttcttttaatcttttcatttgagaaccctctcctcttgaccatttcctttttttttctttaaagagacagggtctccctatgttgcccaggctggtctcgaactcctgggctcaagggatcctcctgccttggcctcccaaagtaccaggattacaggtgtgagccaccactcctggcttttttttttttttcaagacagagtcttgctctgtcgcccaggctagagcacagtggcatgatcttagttcactgcaacctccgcctcccgggttcaagtgattcccatgcctcagcttcccaagtagctgggattacaggcatggtggtgcatttttgtatttttagtagagacggcatttcaccatgttggccaggctggtcgcgaactccaaacctcaggtaatgcgcctacattgacctctcaaagtgctgggattacaggtgtgagccactgcgcctggccttgatcttttccttctcttttcttggcattgctgcagggcaggtatatttttaggtccagtggtcagagcagcagacagcctcctctaccacagactgagtaggaagtggaaggtgccctcccataaagcacagagaggctgggcttgtgcacccttcccaagtcatgtctgccgccctatgcaataagtagaacctgaagtaaaaaaaataaatgcaccgtcatgcgctgatggtgagaagattgcagccacctgtagctctccggctggatcccagtcttcccaccccgtctccnnnnnnnnnnnnnnnnnnnnnnnnnnnnnnnnnnnnnnnnnnnnnnnnnnnnnnnnnnnnnnnnnnnnnnnnnnnnnnnnnnnnnnnnnnnnnnnnnnnnnaaattttgtcagcaactgagccatacagtgttgtggtcttagttttaaaacagaacttttgtttttatttaaagctatttttatttcactgtagactgtatattgctttatatttagactgaatagtatgaaattacagatattcagggccggggtgcagtggctcacacctgtaatcccaacactatgggaggccaaggtgggtggatcacttgaggccaggtagttcgagaccagcctgaccaacatggtgaaaccccatctctactaaaaatacaaaaattagcctggcatggtggtgcacgcctgtgatcccatctacttgggaggctgaggcacaagaattgcttgaacccaggaggtggaggttgcagtgagctgagatccgtgccaccgcactccagcgtgggtgacagaacaagactcttctttaaaaaaaagaaattacatatattcaactcctttgggcctttttacaaaactagcaatttcatatggctcaaactaatcttttgtctattagtctgtagatcggtttcctttctgaagattcgtagagagcctcttgacaatgttgtcaaagtgaaactgtgtggtgtgtgtggaagttatctccctggacacatgtgatactttggttggacttcctcttctaatgttattttctaagtttctgacaaaattagaatgacccagtagtgcttcttacattgtccataatacgttaaaatttttgtttcaaaaacttttctcccccacagtttttggttttacttctgatgtgaacttgaattgtacctgggcattttgtgagacattaatctcatcaagggacaatttgtcagtcttctagtttgctagggaatagcttaagaggagccaagttaactttccatagcttggagtttgagctaagaaagcaagttaaggagggaggacttgttttgtttggatttttccaagaggaaatttctgctgctggagatttaggagtgtcagatgcgtcccatcatctgataattgtatttgcttcactggggtgtgggtgcaaactggaagaaaatgctttagctcagtggttcctcaaactgctctctgttgtattcatgaggggaaatctttaaaataccactggtgtctggactcttcccctaaacattctgatttaattgctttagggaaattttaaaagctcttatgtgatactaataggcctcaaatatgtgttcagcttaattttatgctttataactaagaccttccagttcacagagatagcatatgggttgcgggtttaatccccctcattggtgaataactccttcggacttgtaggtataaacctcaagcatggtagctgttcatcagcccgagtgtcctaccatctggtctgggaatctcatatgcaggagagcccgggtgttgagtcaggtgtccaggcactttgtagaagactccatgaagtcctctagtggcagattggcaagggtagagattgagtgtggactctgagagcaatcatggactcagagcagtcagacctgagttcacatctcagtgctgtcattttctaagctgtaaaatcttaagagaagcacattcgcttcccagggccagtttcctgataacaacttgttgaagactactctttccccattgaattaagttggagaaaatgtagattagatggccatttatgtgtgaatctttttctggatcctctattctgttttgttgatctatattttctttgttttactttagtagtcagatggatagaatctattctttcttcatagcaaattatcttaattactatagctttataaatcaaatagtgaaagttacccaacctgtttttcttttatgattgttttgactattctaagtctcttgcattttcatattgactttagaatcagcttttcaagttttacaggaaactgttgggttatgcatcttgaattctaagacatggtcttagaattccagatgaagtaattccagatgaagtaattgccctgttggagaagtaattctccaacagggcaattctatccacctgactattaatgttaagagtgggcatcttaacattatttagatttccagtctaagaaaatagtgtatttacctattcctcagttatctacatctttataaatttctttttctttttttttttttttttaagtggagatggagtctcagtatgttgcccaggatgatcttcctgagctcaattgattctcctgtttcagcctgccaaagtgttgggattacaggcatgagccactcacgccaagcactagatctttaactctccttgtaattattaggatagaggtcttaaagatcatttgttatatttttatattttatatttttatatttttatatttgttagcatttaaaaaagaatgccataattcaaagtagcatttgtgctgttataaatggtattttatttatttattttatttattttttgagacagactctcgctctgttgcccaagctggagtgcaatggcacgatcttggctcactgcaacctccgcctcctgggctcaagcaattaccctgcctcagcctcctgagtagctgggattacagatgcatgccactgcacccgactaatttttgtatttttagtagagacgggattttaccatgttggccaggcaggtctcgaactcctgacctcaggtgatccacccaccttggcctcccaaagtgctgggattacaggagtgagccactgtgcccggccataaatcgtattttaaattttcacttaccgtttgttgttagtatatagaaatacaattgatttttgtatttttgctttgtttcctgaaaccttgctaaagtgcgttaagttgcagtaatttttggctgattccttaggatagctatttagataatcatgcctttggataaaaacaaatatactctgtgtgtgtgtgtgtgtgtgtgtgtgtgtgtgtgtgtgtgtgtgtgagagagagacagacagacagacagacagtgggggagagggagagaagaagggagagaagttaaaatctccggttatgagagttagtctctttttctccttagtcatgaactttttgcatcctgacttactggattcacttgtatttaaagtttcttactggattcatttgtgcttaaggtttatttgtatttaatatcccctcatcttcaccgccatacaatatttatgctttaattattcagttgtctttccacaatttaaaagaagaaaaaaatagtttttaaattacccactgaattactatttctggtgctcttcattccttccctttagctccaggtttccatttgatataattttttttcagcatgtaaaacatctattagcatttctttattttctttttttttttgagacagagtctcactctgtcacccagactggagtgcagtggcacaatctcggctcactgcaacctccgcctcccgggttcaagtgattctcctgtctcagcctcccgagtagctgggattataggcatgtgacaccacacctggctaaattttgtatttttggtagagatggggttttgctatgttacccaggctggtcttgaactcctgacctcaagtgatctgcctgccttggcctcccaaagtgctgggattacaggcgtgagccaccacgcctggccaacatttcttatagtagaagtctgctggccatgaattctctcattttgttctttaatctgaacaaatttttttttttcttttgaagcacatggttgctggatgttgaattctgggtgatagctggtggtgtctgcccctctcccttcaaaggtgttccattgtcaactggccttcattctttctaataagttgttagccatcatttgtatctttattaccttgtttgtaatgtttctctttttttttttttgggttgatttttttttctctttgatactgattttttagaggattgataatgatcctaggtataatttacttggtatttatacttctcggagtttgctgagcttcttggatctttgatttgattctttttattattgtaaagtttaggaaatatttaaccattatatcttaagttttttttgacttattctcacactcttgtttttcttggactcctattacatatatattaaactatttgagattgtcttataggacagtcagtctttttcacttttattcaatcttctctgttgcttttaaactgctgataagaccagccagtgatttttcttttctcctttatttctcatttcagtattgcagctctagagtgtttattgggctctttttaaaaatactttacactggccaggcacggtggcatgtaatcccaacactttgggaggccaaggcgggcagatcacatgaagtcaggagtttgagactagcctggccaacatggtgaaaccctatctctactaaaaatacaaaatttagctgggtgtggtggcggacgcctgtaatcccagttactcaggaggctgaggcaggagaatcgcttgaacccgggaggcagaggttgcagtgagctgagatcacaccactgtactccagcctgggtgagagtgagactctttctcaaaaaacaaacaaacaaacaaaaaactttacacttttttgctgaaaatctctatctctttactcatatttttcctcagtttctttgaacatactaacccattgagtacatttatacttgtttctgtaaatcttaaaatccaatgtgtgtgcctacttggatttgcttttattatttatatatttgaggggtttggtttttattatgaagactgctttctttattgccctgagttaaattttctttcttgcatgtctaagattttttattgtggacattttggatgatacattgtatgtctgacttctgataattctaaaaagtattgaattttactccaataccatattaactggctgaactcataggcctgttttttatgctttgttagggcagaactttggaaattttcaggtgttttccaagcttctctaacttgatgggactcaagattcaaaacatgtgtcatttgcaggccctgttaggtagtgcttgttttttcttgggcaagtttagagttaactcttttttagtgctcaacctgggtagcacttgacatttagggctaaataatttctttttggggatggagaggctgctccgtgcattgtaagatgttgaacagcatctgtggcctctgcccactagataccgaaagcgtccctctagttgtaacaaccagtagtgcctccagtcgttgccacatctctcctgggaggcaaaattgccctgtttgagaattatttctctggatagtgctcttgaattctaagacatgatctctctggtgtttcaaccgtatgccaggtgtgttaatgatatatgaatgaggtttccgcactctggtctggtgagaatttcagtacctcacctcagcttgaccttcagtatctctattcagctcactcctcctcagcaccagctctctgttaaggcttgggcggccttgacctgtgcccgcgcatcagccaaggacttgtagcacccccaccccacagccttctggggcccttcccttctgatacctgcttactgtccagggccatgcagatgccagtggctttaactaacccaagctctggcctccacccctttgctcagcagggctgctgtgatgtgtttggacttcagctcactgccacagtcggaaagtggtgtcctagctcagagccaaggcaatgcttggtgtctggagacatctgccttctagtgttgtacagttctgaggcagaggagtgggccgttatggtatgagccacttagccgtggccagagcccagtctctctgctagttgaatagcccagatgtttatgagctgtggagctgggagctccaagtgtacagtatagggtgtggttgtgtgagctgtaggacatgcctgtttaacttccttactgaatagatggagggtgagggcatatgcaagactgaggggctccagcatctgccatatgtcacctgtgtgcttaacaaaaaccccaatcctggggccatctcagacctgacctgctgtttcagaatttctagagaaagggcctggaaatctgtatatttaatttgtgcctcagggaagtttctgtactagaggatggcgaagggaacaacaggtgtggagagggaggctggacgtggcttccttgaaagggaaagggccgcatgaggctctgcattcctttccccaggacttatattgaaatcatggccaatgatttatttattttttaaaaatattaattcagtttttaaattttagttttttttctgttttttccttttttctatcttctaagacatcctgttatagcaaatttttacattttttcattgccctgccctgaaaatgtttttatttctcgttttttttttaacatatttctctaggtttagaatttgtattttgtgcttatttactgtcaggccttcaaacataattgatttgtttttaatctttttctactaaaaattaaaaaaaattgtggtaaaatatacataacggtcaggcatggtggcttacacctgtaatcccaatactttgggaggctcagatggctggatcgcttgagccttggagttcaagaccagcctgggcaacatagtgaaaccctgtttctacaaaaaatacaaaaatcagccaggcatgatggtgtgtaccagtagtctcagctacttgggaggctgaggtgggaggattacctgagctcaggaagttgaggcttcagtgagccatgattgtgccactgtacgccatcctgggcactggagtgagaccctgtctcaaaaaaatatctgtcacataaaatttgtaatttttgcaaggcatggtggctcttgcctgtcatcctctggtgtcctccattttactttctgtctgtaataatctgattactgaagggacctcatccaagtgggatcataccatatttatccttttgtgagtggcttatctcacttcgcatcatgtcctcaggtaaatttaattttggggtttatgtcatacattttctcagcatttagtgaaaaacttctgcctcaccctgatcctcaactgtggtgctgaacctttatttagctgtagtggaagaggaaagaatttctgagattctacccttttctggcttcttgctctgagcaactgcctgtgtcctgatgtgttttgaagtcctcatcttctcctttctactccctctgggacccattagctgaaggaacagggtcattttctcttttggatctctcctgggggtaatagctgtgggcacagggctgttatttgatatgcttatcatagagtcgagaaagtgggaaggaggtaccttggtaaagagtgtctgtccctcctctctctgtgcatttttctcctaattcctttatcctcatcagtgaaagagatgaaggcattactgcatttggtatgtttggttgtaaaaatgtatgttagtgaataagtcattagtaagacattttctgacatctgtcatttttttttcctgctgcacaaatctcttcattttcttaaagcttcaaagataatcttgaaatgggaatgaatgatggaatgaattttgcagtattacagtactgtgtactgttactttcggattactgaatatctggcctactcaaggtcaatactttgataaatacacaacattaggaaaaaaggaaaatcacgtatgtaaaatattttcattttgactgattcttagtaaaattttggtgagtctgtagagtgaagattgcttcctccaagtattcttagtctgaaagacggcacatgaaacatgtcatatttgagaagatacattataaacacatttcttatttgtttcttataatattcttttagaagcagaaagcaggctgggcacgttggttcacacctataatcccagtactttgcaaggccaaggcaggtggatcacttgaggtcaggatttcgagaccagcctgatcaacatggtgaaaccccgtctctactaaaactaaaaaaaaaaaaaaaaattagccaggcatgatggcgcatgcctgtaatcccagctacttgggaggctaaggtaggtgaatctcttgaatctgggaggtggaggttgcagtgagccaagatcatgccattgcactccagcctgggcaacaagagtgaaactgtctcggggggaaaaaaaaagcagaaagaagaaaaacatgataaaaaagatttttaaaaaatgatgatggatgccaaacacacctctaatcctagaactttgagaagccaaggcgggagcattgcttgagcctaggagttcaagaccagcttggacaacatagggagattctgtctctgccttggccctccctgttctaccctccaaaaaagccaagtgtggtggcacatgcctatagtctcttacttgggaggctgagacaggaggattgcttggaccccagaggtggaagctgcagtgagctgcgatcatgccacttaactccagcaaaaagagcaagaccctgtcacacacacacaacaaaaagatgacagaagtttggtttttttcttcctcttcaatgggggtatactgcatttatattctccttaagatgatcttctctgacctaaccctagaccatgtatttgtccccatgtatgtcctcactgtcccttctttacccactccctggcttgtcaccctctccatattttcctttttcttcctgttgccctgccagtatgtcttgctcatctctgttcccctctcagtcgataaaccagttcagttggggcttgtttttcaggcaaagaaactggtgatagcagggtctggggctgaggggtctttcagccatggtggggggatgtggcccccctttgaacagattactctcaaactgtgttacatgttctttccatgggtattggtagaattgactaattagattgtactaatttccttcaatgtatattgactgccccaccactcattgaaacgctaatggttttttttccctttcttttcttttccttccttcctttctttctcactctctctttttttctttctttctttctttctttctttctttctttctttctttctttctttctttctttctttctctttctttctctctctctctctttctctctctctcatctgtctgtctcttttcttttcttttctttttttttcttttctttcttggttttgctctgttgcccagactggattccagtgggatgattactgcttactgcagccttgagctcctgggctcaagcgatctttccacctcagcctcctgagtagctgggactacaggcatgtgccaccatgcctggttaatttttaaatttttttgtagacaggatctcactacgttgcccagtctagtcttgaactcctgggctcatgtgatcttgccgccttggtcttctaaagtgctgggattacaggcatgagccaccctacctggcctacggagaactttctgtataggttttcaggcttgtattccagccatgaaaaatcaggtgaaacacaaacaaaagcctcagaaggcagtgaaactgtcagattataaagaacatacaggttgttgattttggatggacattttcatctccttaaatttcatttcttttacagaattagagaaggaatgtgactttggtagtcacccatcatgtttacgaggaaggaggatattagccagtccttggatcatcccctcagaaacagagattattggttttagattgtgcagtcattaaagtagatatgttgttactaagcaactctggccaacagtattggaaaaatacaggcaattttctgcttcaagtgattaaacatactcatcctagttgcctgttgcagaaatacccagtttaattggaagtttcattacctcacaaactcaactctggggtagggtcatgaaccaggaagtaagcaaaacataaaataaataagatagataatacttactttatatgcttattcagaacgtttttactctgactttacttacagcactcaaaagccacatcctagtctaaaacactagtaggtaatggtgtgacattctgatgagaataaagagatacctgatagcctgacagccaggggcaagatggatcaggaagtacccgaatccgaaaagtgtggccatttggggactctgtgagaggagcatccctgtccaccccgggtcattgacactgggtaagagccatattgttgtgaggaatttgcatcgtgaaggtgatgaactgcggtttgcatcttttgttttatttatttatttttttaatttttgagaaggagtctcactgtcaccctggctggagtggcgcaatcttggctcactgcaacccctgcctctcgggttcaagcgattctcctgcctcagcctccccagtagctgggattgcaggggtgtgcgccaccatgcccagctaatttttgtatttttagtagagacggggtttcaccatgttggccaggctggtctcgaactcctgatctaaggtgatccgccctccctggcctcccaaagtgctaggattacaggcatgagccaccgtgcccagccgcatcttctgttttaaaaggactattagagaggggggaaagacatctgttaaaatgaagattggattaatgcatttaatccaaaaagggatattcatctcaccagtctggaaaactcagttccatgaaaaggtcattctctccttccacctccctttgatggtgatatttatgtggccacactgattaaaataatcaagaaagaagaaacagtttatatttttcaaatgaagctagatattacatgatttatttttaagaaattgaatacaattaatgttttgttctagatagtacagttttcttgtaatctcaaatgtatttccttgcctgccttcagtagtaagcagctatcaaatggtgccctgctctgatggtgtttacttccaccattcacagtattgttcttaatggcatgcggattctagagtaaccaataattagatactcagatgttttccagtttttagtaattagatagttagatgtcttctagtttttgtatattacaaatagcattttaatggacatgattaaagctaaacatttggacagatccttcatttcctagggcgtacaaatttcaaggcttttgctatgctagattgatttcctccccaagagttgttaattacttacattttccccggtgaaatgagagagctccctacaagtccagatttgatgttatattttaataatcactgtcaatctcaccaattttcataggtgaaaaataatgcattgttgttttaatttacatggctttgtgtaatagtggatttcagcatttgcatttccttggccatttgtgctgggttttttttttttttttttttttttgtgaatttcctgcacacattctttgctccttttaaaaaataattggtaggcatttataattcatatcgatatgtaggggccgttgatttattaaagatattttgggtctgggatgtgtactacaggttttgatttcagtttgttttagttgccttttatttgttctcatggtagaactattttgttttcacagggaaaacaaatttaatctaatggtgtccttttataacctgtcaggttaatgaagcatagaatcaaaatatttgcagaacgatgatacattaatttacagattttttctgtacattggatgtgaactcttttaaactataacatggacactttattggaaccaaactttagttttctacattaatgagaaacactggtaactttgcttcattgaaaaaataattgcttgttctctgtcagatgtaagtagtttgagtttatttttatcttctcatctacaaaataggaataattcttacttcatagttgttttcttgttcagttgtctggcttacagtaggtgcttactaaatggtagcttgatttatgatcataatgacataaatgaatatgacttggtctatatattctggtagctgctgagggtaacacagatatatgattacactaattgtacttctgaggatgtgagcagtgttttgttgttgttgtttgtttgtttctttggtgttgattttaggtagaactttgattatcaattttatgccttctttttaaatgcaaagtccttaaagccaaaagtttactctaagacttgctttagctataactcgcaaattattatcatttactttaaaatatttcagatttcccttatgatgtcatctttgacacatgcttatttagaaatattgttaatattcagatattttgagttgttagagatgtcttattgttgatctgtaatttaattctgctgtcaccagaatacattctgtgtaacatttttatgttcagatattgattgaaatttactgacggcccaacataaggactattttaccttaaaagttagaagtatgcaacagtaaaattctattaccttccccatcttgtgtgctattgtcgtatattttacttctgtctccaaaatgcaccattaccatttttgctctaagcagctagttgtttttcaaagtaatttgtcttctttttatttattttttatttttttttagacaaggcctcactttgtcaccccggctggagtggagtggtgtgatcttggctcactgcaacctccgcctcgtgggttcaagcgattctcccacgtcagcccccgagtagctgggtctacaagtgtgtggcaccatgcctggagaattgttatattttttgtggagcccaggctggtcgcgaactcctgagctcaagcaatttgactgcctcagcctcccaaaatgttgggataacaggcatgagctatcatgcccagcctgtccttatatttactcacattggtcattttggtttctctttattctttctgtagatctgagtttccatttgataccatctccttatagcttgaaaagtattctttacgctgttttttacagttcaggttcattgctgataaagtctctcagcctttttctgaaaatgtcctaatttcaccctcatattttaaaggacattttgtgttggtgatagaattcagagttgacaggtgtttttttttttttttttttgaattggagtctcacctatcacccaggctggagtggagtggcgcgatctcggctcactgcaacctctgcctcccaggttcaagtgattttcctgcctgagcctccggagtggctggaattacaggtgcccaccactgtgcccggctaatttttgtatttttagtagaggcggggtctcaccatgttggccaggctggtctcgaagtcctgggctcgagtgatctgcccgcctcaaccacccaaagtgctgggaatacaggcatgagccaccgcacctggccagttatttttgtctgtctttcagcactgtaaatattgttctgttgtcttcttgttttcattgtttctggtgtgtcagcttctgcttgtttttgttgtttctctgtgtttaatgtgtgtctaggtatagatctctttgtttttgtccttcattgaacttgctaagattcttcattatgtaaattaatatttgctaccaactttggtaaaattccagtcattatttgttcaaatattttttcttcccctatttcttcttcttttaggactccaattacatgaatattttattgcttaatattcttccataaggaccttcattcagtctttgttctttttcttaactctttttttctgtttgttcttcagatttcagttgtaaactatagaaggaagggttagcgactctgggaataaatcaatggaaagtatctgctattaatgatatctaatttatttttcatttcaggtattaccttttcagtttgagaagttctatttggttctttttgatattacctatctcgctcctaaactcacatctacttgttataaccatatttttctttaactccttgacatattataataggtgcttcatagttgttgtttactaattccaaaatctggatcatttcagggtctatttctgttgccatttccctcctttgattacaggtcacattttattgtttccttgtgtatctagtaattgttttactatgttgaacattatgatcgatatactatagggagtctggattaaagagcattgagttttgttcatgcaggtagttaaattcctggcagattggcccctttagcattgaatccttctgtctgtctgtcaatcagttaatcatagggcaggtagctccattctgaacttattccaagtgcacagctgttaatctagggtgagatctttattactaagacatagccttcctggtgtctcaggtgaatgcctgaggccccagtggagatttccttcctctcctcgggcggcatctcctactgcatgacctccagaatcttcggtcagcactcagccccatagctgctgctttcctaggcctcatggagtctggccctgcttatgaagccgttggcaaagtaccctgggtaaatccctactgaaacttctggggcaaaccctctgctactcaggctcacaaattccagatgcttctacaacttggaacaaccatctcttcctccaccgctcagtgaaactgttttgcttgggcagaaaatgtcctcaggcataaagccaggtcagtcccgggccaccacctacatttcccgtctcttgaggctcacagcctgtgttacctgtggtccagtgcctgaaaacagctgtgtcatatgttttgcccaacgttacagttttccaggggagggcaagtcctctctcatggttggaagcagaagcctggtagtttgcttgtcagctgtgtcttcctctttttttttttttaagatggaatcttgctcagtcgccgaagctggagtgtaatggcacgatcttggctcactgcagcctctgcctcctgggttcaagtgattctcctgcctcagcctcctgagtagctgggattacaggcacctgccatcatgcctggctaatttttgtatttttgtagagacagggattcaccatgttgaccaggctggtctcgaactcccgacctcaggtgatctgcctgcctcagcctcccaaagtgctgggattacaggtgtgagccaccgcacctggcatgtcttcctcattaataatattcatggcccttcatgattttttttatcctatctggagtatgactgatttaatttcagcaggcccttaatttctgtgttgactgtagagttatcgttcacttgggttaacttctattacaacccgagtatctgcccagccttttattccacctctacacctggtcacagtaatacacgacttacaagtagccctcctggtgcacccagaagaactttgtctttttcacaaattggcatctgtgctgtcttacctaaatcctcattgttggcctcagacacaatctgtggatgatagttcaagttgggcacaattgacttcagatttcttgaaaagggtcagcttaggcttagagtttggtgttgacattttgcttttatttttttaaaattaggtatcaaatttacatgctttaaaaatgtggtattttctgcatgtgggattaacattttgtatgtaagactggctttataaatatttacagatagtttgtagtcaataaggcacattacgttctgtttctttcctacaggggcgggctggtctctctccttccctttcttctccctcactcctacattttcttctttctttgtattttacgattgattcacttatatttgcataatagcattttttaatttttttttttttgagacagtctcactctgtcacccagactggagtacagtggtgcaatcttggctgattgcaacccctgcctcccggttcaagtgattttctgcctcagcctcccgagtagctgggattacaggtgcacaccaccacaccaagctaatttttgtatttttagtagagacagggtttcaccatgttggccaggctgatctcgaactcctgacctcaagtgatctgccttcagccccactaagtgctgggattacaggtgtgagccaccgcgcccggccattttttaacttttcaaaatgttttcacttctatctggccctttttttcccattcacatagccctcgttgacagtcttgttgccttttgcctggactgttattccagcggcaactcattctcctccttccagtagtctcctggccaattgcttctactgtttaaccttccttaagttgagtttctccctctaacttgaaaaaccacacgtactgttccatattgccttccataagcttcacctgcttcagccctgcttccatgagcttcacctgcttcagccccatttccataagcttcacctgtttcagccccgcttccatgagcttcacctgcttcagccaggtttggggtgttctttattcagcagcccccacatcctccttctccgtacttctgtcctagctaggcctcccctgcagtgcccttcccttccctccataaagtccctccttcatcgtccagggtctctcccacccagtgtccctcagttcgaactgtccccagttctctgtgcaggtcacagttgaatcacaggtgtctggacatacctagccctgtctcccaaggcaggaaaacatgactgtgtcactgtatctgctggggctcctggtgtcctccagatagttgatactccatatttgtcatttcccattgaacacattgaaaccctgtgatccaggcagggtgaagagactaaggccccatgtgtttaataatgttgcacagagaattagtgattggtacggatttatagtccacgtcctctcattttgttcctctgacagcctctctgttcttccctaatttggctcaaaattactttggttggctcttaagtagaaacttatgtccttttgtacttgggggcgtgtccaaattcattaaatgaggtgggagatttttcttcttcctacctctcgctttgctgtcctgacacagctgccaccactaaaggtgctggtggggcagagagagggggcagtgggggggtggggatgcttgtgcttagatctggtcttgacatcacacgagacttcctcaggtctgctgtgtcctaagcctgacttagtatcactgcatgaatacaattctctacttacctcttttatttcaggcacttcgtcttagtaacatggccatggggaagacaaccacaggccagatagtcaatctgctgtccaatgatgtgaacaagtttgatcaggtaagctgcagctcagggatcctttttcattgcattaaacacccctctttccccttttattctttctggaggcaggggctcactctgttcacactggattgcagtggcaggatcatagctcgctgaaggcttgaactcctgggctcaagtgatgtgcgatcctcctgtctcagcctcctgattagctgtgactacaggtgtgcatcaccgtgaacagctaatttctttttttttgaattttcatgtcagatgggctattgtggaaacatcataacaaaattcaagggtggcacatctcacacaagtgcgtgaacacccgattatcatgctcatgaactacaaaaggattgctggctaatttctttttttattatttgtagagaagggatcacgccttgttgcgcaggctggtctcaagattctggcctcaagcgattctcgctaccttggcctcccaaagtgctgggattacaggtgtgaacaccatacccgcccagtatccattgtttaatacttaccttgtagcggtatcatttatccagggcattctagctgctggccatattcattttgcactaggaccacttcttttttccaattattcattcatcagaatgaactaaagcctccgctcagtgtcagggacaatgaataagacttggtttctgttctgaagaagctcactgcctgtctgggagacaaacacacaagtaaattactggagtatgtggtgggcactgtagtacaggttttcttggggtactggggagccccagggcatatgggagctgaattctgtggcagagagttctggaaaatgctcagctcatcagtgaagatagtcacgatcaagacattcttctaatgccgctggtcggattctcttgcgagtctcccagacccactctttgtttccccagaatggcttcacctgtggtgggtgcttggctttctgctttagcaggtgtaaacccactgtggccatttctgtttaggatcttgcctgttcttttccagtggatcgtttctgtactgtgttcttactggttttgcttttctggagtcctaagaacgctctgtctttttctttaaaggtgacagtgttcttacacttcctgtgggcaggaccactgcaggcgattgcagtgactgccctactctggatggagataggaatatcgtgccttgctgggatggcagttctaatcattctcctgcccttgcaaagctgttttgggaagttgttctcatcactgaggtaagagaaatactgctgtgaaaaatgtcatatgtatttggtaacatccacagtcttcccaatgcttttgttcagaaacaaactaaatgccttttattatctcttccttgcatatgttgcagctcttcaggctcagccaagggggcctctgtccttatgctgaaggcaaatcttcaagggagaaaggtgaaggcattcactggctcctcccagccagcttttcaggcgctgtggcctcaataagtagagtgtccttaagcagaaatcacatatgtagaagttagttaaacatataatgaataatgataaattgaaatgtttcataggctccattctagctgcatacatctttaccgtgcttgtgttagagctgttttcacgtgtatatatgtgtgttatttttaattcagtatttccattaaattgtaagctccccaaaggcaaggtgaattttaatgatgtagttataaaatcacacagtcctagtagcatatgtgttaggaatatggttgttagctggtcgtggtggctgaagcctgtaatcccaacactttgggaggccaaggcaggtggatcacttgaggccaggagtttgagacctgcctggccaacatgacaaaactccgtctctactaaatttaaaaaattagctgggcatggtggtacacgcctgtaatcccagctacttgggaggctcaggcacgagaatcacttgaatccaggaggcagaggttgcagtgagccgatattatgccactgcactccagcctgggtgacagagtgagactctgtctcaaaaaaaaaaaaaaaaaaaaaaaaaaaaagaaatacagcttttgatcaagagattaatgatgataaaataaattagacttgaagcaggttccaacgaattggaaatggttcattgtcaaggttgtcagctggatcgagatgagccactgttggaagtgcattgagttctttgttttatgcttttgcttatggtgtattttctacttggaccttcccctctttgccatctggagaaatagtccttgtcctttgaggccccgttcaaatgctcctggtcctctgaagcttttttttttttttttgctctcctctttcccggtggagttaacaaacagccctttcttttctgctccccagcacttcattcccattttagcactctctgaccactgtgttatcgtcaggctcgggtgcctttctgcctttcctgcccacctgtgagctcctcgaggggacagatgacatctgactcattttcatgtcttcctcagcagatattacaaattctccaaaatacttgttgagttggtatagattgttgacttcctaatcgaagtctttttctatttgtattttgagtaggacctgtctgtgttgtcggaagcaaaagcgctgtagggaaccatgtgatgcaggtccctgcctgtgcctgccgctgataagggcaggctgtgatcgctcaggctcatctcccgtgtctggttccccttaggagtaaaactgcaactttcacggatgccaggatcaggaccatgaatgaagttataactggtataaggataataaaaatgtacgcctgggaaaagtcattttcaaatcttattaccaatttgagaaagtaagtttttgtatacattgtaccatatttttgtatttttctatttgctattcttgttgatggttttagaagttttactatgttttcacattatgggaagttcagtacaatccatcccagtccccacgcttggcagttgggttaagtagaatggtagagaacgttattttcacttggtcttccatttaccatgttcttaaacagaaagcatgtatgcttcttactaatacaaaagtgaaattccaaatgtttctgaatatcccaaatcccaacaatgagtctaagatgttagtatttgagaataatggtgtttaaaataaaactataatttatattaatgtagccaaatggacaagttatagagactgggcatatctatattggaccaaactatatgaatcagtatttttcattccaaacaggcatggaaatactgttagttgtgctttgttttattagaaattttggagggggctgggcgcagtggctcatgcctgtaatccaagaactttgggaggctgaggcgggtggatcacctgaggtcaggagtttgagaccagcctggccaacatggtgaaaccctgtctctactaaaaatacaaacatttgctgggcgtggtggcacatgcctgtaatcctagctacttgagaggctgaggcaggagaatcgcttgaaccaggaggcggaggttgcagtgagctgagatcgcaccattgcctgggcgacaagagtgaaactctgtctcaaaaaacaaaatatgtattttttttttggcttttggattaaatatttgattagttgttgcattccagcacatgatacttcttatgatttcttgggtagttcctggccacctctcacctttgcacttttttgttgttgttgcccaggatggtctcaaactcctgggttcaaacaattcatccacctcagctcccaaagtgctgagattgcaggcgtgagccactttatctggttgacatcactgcttttttaaaaacctgtactctctttcaggaaggagatttccaagattctgagaagttcctgcctcagagggatgaatttggcttcatttttcagtgcaagcaaaatcatcgtgtttgtgaccttcaccacctacgtgctcctcggcagtgtgatcacagccagccgcgtgttcgtggcagtgacgctgtatggggctgtgcggctgacggttaccctcttcttcccctcagccattgagagggtgtcagaggcaatcgtcagcatccgaagaatccaggttggtgtcagatgccattttaaagttgtaggtgcatttgaagtagaatgatgtctccttttatttagcatcactatgttccagtgtaatgacatttaactctctcataaccaaaacgtgccgccattccagaatgttgtgtgtacttccctatcttagatagagcgcggtaaagacaatgcaagcattgtgattcatttgttggcagcaacataaacagcagtggcacagggcttttgatgtacaggtggtaactgcaggggtgattaaaatgtctaagctgtctaaaagcaggaaaagcaaatagatttcatctcttatgttaacaccaatgagaaagtagtgagtatgagttgagtatgattcttctgtgggctggaaggaaagagcttgctgggggtctctgcttcttggtcaggaagaatggcctcaacttcacttagctatccctgtttgaaaataagttctttcctctgtagatgttttccttgttaatttctgtgcatgcctttaggacctctgccatttctttcctgtccgcttttcacttttttcttactgttgatgaacctatctctgccagacttctttatttccaattggttgatttctactgccttgctccatttgtacgactgtaacaaggaccattctctgcttcccagatggacctctgtgtcctcccatcgtggaggaaacagaaggacaaaatgggcctggttagttccctccagccttctgtaaggacactaatccccttcaggagggctctgccgtagcgacctgatcacctcttagaggccccacctcttaacactgatgctggggtgaacttccaacctgtgaatttagaacaggcatgcccattcaaaccatagcatccactttacacaccatcaccttttcctaagtcgctgtcactcaattgccaggggcaaataatttatatcaccaaggtaaggtcctggcacataatgtatgctcaagtatttgtgtgtttatgaataagttgaaaattaaaataaattggctttgtgagagggcttggcaagaacttgactgtctaagcttttcaaaaatctgctttgttttattcctggttcttaatagagatggatgcccaaggacagactcgagtgaacttagctgacactggctgtgattatttttttatttttatttttttggtaggggagagaatggggtgggtgttgtcataaaagctaagattcttttttatgatgaagtttgttttttaaagatgagatcttgctgtgttacccaggctggagcatagtggctattcataggcagactcccactactgattagcaagtttgtatttcataaaaaatattacctataaaacagaccatacagggtcatttcttatccccattctttctgacaacagcttcaggtaacactgtgaagggatggtccatgcaggtcagtaacacttttttcatgtagcttttgcatcttgaaagaaagaacttaggagtatactttgaccagagtatctttctgagtgtgcaggacacctttttcagacggaagggccacatgtgtattgtgctgctgtaattctctgactgctgttgctgcccctcaccgtgattgcaggtgttggtgtgtgtaccgtggaccagggctcttggaagcctgtacatgttatttcatgttatcctcacaattgaaggagataagcattagtgtccccactttacagagaatgaaactggctcctgtaataggttaaggagtttgcctatcttagaactaggaatctgttcagaaccatgatttcttaaccatggtatgttgcctgttgtattaatctgtttttatattgctataaagaacttcctgagactgggcaatttatattggaaagaggtttaattgactcacagttcagcatagttggggagacctcaggaaactcacagtcatggcggaaggggaagcaggcactttcttcacagggtggcaggaaggagaagtgcaagcagggaaaatgccagacgcgtataaaaccatcagatctcatgagaactcactatcactagaacagcacaggggaaactgcccccatgatccgattacctccacctggtcccacccttgacacgtgaggattatggcgattacagttcaagctgagattcgggtggggacacagagccaaactgtatcacctatgttgctgccttagtatcctctggtgtgggatatttccttcagtattcttttactcatctagttgtattccaaaaaccttgaaaggttctctgtttcttgtggagtcctatttttgaaccctaggtgtagggcttacctgtgtgtgtttcccagcacatgactcgtctctgttcccactttggggtcttttgctctgtgtggctggggtgtcctcccttctgtccttgatttaagcaaatgctactaagccctccggccaggtctcaggagcctggtggtacttttgttcctgccgagcaaggccagtacggtgcagctcagcattgatggacacataatgggcaccaaatgctggatggacagaagcagcaaccttagcaaaagtctggggcccaatacagacccaaggtggcccagcctgcactagaagctagaggaaggccgagcgaggaagcagactcgagttgaatattcccagaacaccaggccttgttcaaggggggtgtgagggtccttaactctggggagctggatttttttcagagtggactggatcggagtctctgcctcgttatgtgtgtccctctgtgcatctcaaaccctcttggacttggtggacctgctcttgtaagagaggggccatgtctgacattaaatatagaccctcctggccaggcgcggtggcttacagctataatcgcagcactttgggaggccgaggtgagcggatcacttgaggtcaggagttagagaccagcttggccaacatggtgaaatcccgtctctactaaaaatataaaaattagtcaggcatggtggtacatgcctgtaatcccagctcctgagctacacgcctgtaatcccagctcctcaggaggctcaggcttgcttgaacccaaaaagtggaggttgcagtgagccgagattacgccactgcactgtagtctgggtgacagagtgaggctctgtctccaaaaaaaaaaaaaaaaagagcctcctgactggcttccaggctgtgaaacaaatggactttccttgggccatgtggagaaatagaaacagtcttacttggttaataaaattagtctgtcttcctggccattatgagataaatgaagattaagatcaagaccatggggctttatatgaacaggtaatagctggtgagtacccactaggtaacaaggaggggcccaagtgccttatgaatactcactccttttacttgtgtaactcccctatcattcccacattacagataaagaaactgaagcctgaggagggtgaatagcacctccacgttttaacagttaataaaaggctgatccggggctttagcccaggccgtcaatctgtctcagaagtgcggccaggcgcgatggctcacgtctgtaatcccagcacttttggaggcctaggtggacggatcacttgaggtcaggagttctagaccagcctggccagcatggtgaaaccccgcctctgcaaaaaataaaacaacaacaacaaaatcagctgggcatggtggcacgcacctgtaatcccagctactctggaggccaaggcacgagaattgcttgaacccgggaggtggaggttgcagtgagctgagattgcaccactgcactccagcctgggtgacagaggagactccatctcaaaaaaaaaaaaaaaaaaaaaaagtgcacattcttatccccacatgcacagcataacctgaatgcagatctcacttccatgcggcagccataaaaaataattgggcaaagagcagccccaacaggtggtatggcggggtgggacgcagaccttgggttctcaccaactctctgggccttggttttattgtctttaaataaggggattggacttagtgtctggaggtcatttcctattttgtctcacttatttagaaaaccgtctgtattagtcagagttctccagagaagcagaactgatagggcccacgtgtatgtacatgcagagagagattggtagattgattgataaaattgtctcacgcaacttggaggtgacgtaagtctgcaatctgcagggcagctggcaggccagagaccctgggaagagctgatgatgcagcttgagtctgaggaggacagtcttgaggcagaattcccttttctttgtaggtcttttttctcttaaatgccttcaactgattggatgagccccgctgacattatgtaggattttaaagtctacagatttaaatgctaatctcaactgaaaaacactttcccattgatacccagacatgtttgaccacatatctggggactgtggcctagccaagctgacacataaaattcaccatcacagtcttttttttcttttgagatgagtctcactctgtcggctaggctggagtgcagtggcacgatctcagctcactgcaacctctacttcccgggttcaagcaattctcctgcctcagcctcctgagtagttgggattacaggcgtgagccaccatgtccagctaatttttgtatttttagtagaggcaaggtttcaccacgttggccaggcaggtctcgaattcctgacctcaagtgatccacccgccttggcatcccaaagtgctgggattacaggtataagccaccgcacccggcccatcacacactctttaatcctcatctcttcttttgggctctccatacgtgactttgtcctcattttccccttattattgaagccatttgtttatagatttctttcccttcctaaactctaaacttacaaaaggcagacacagtgcctcattcatctttatattacgtatagattgcaggtgctcagaagatgtgtaagtgaagtcaacctccagcttcattacatctatgagatttggaaaatgcctaacaactgagcattattttagtgggaagtgatgactgtcgttctctgctgaattatgtcacacatcagagagtgtggcatgaaagggatcctgcagacgattttcagggaattgtggtccaatatgcagctagggaagaaatccttaggattttttatttttttcccaccaaaatgcaactcacctgtgtctaaggcttgaaattcctgttcctgtagatagatgtatgcatgtagtaaaataaaatgaccggctgggaattttacattttccagtggctaactttggcaaggtgctctgtgtccagataaaggatgcatctttgacttgggcaggaaaccttaatttcccctcatgtacatagtttctggtgggagggtgggcctagagttcagcagtagtgattttcagtaaaggagaaacaaatggccaggcatgactggtaagaaagcgttggcgctcgtatggtaaactccttcatggtggtgttgaagtcattgttggaggttttgttttgttttgtttatttgtttgttttttcttcctttagaactttgtgttttttcaacctggatggttcctgtaacccatttaaaattttgtccccaagttcatcagaattacctgatgcactgattaaaactaaattattacaccttggagattctgcttcatcaggcattggctgggtcccaatatcttttgttttgttttgttttgttttgagacggcgtctcgctctgtcaccaagctggagtgcagtggcgtgatctcagctcactgcaacctctgcctcccaggttcaagtgattctcctgcctcagcctttggagtagctgggactacaggcatgcaccaccacacccggctaacttttgtatttttagtagagactgggtttcaccacgttggccaggatagtctcagtctcttgacctcgtgatccacccgcgtcggcctcccaaagtgttgggattacagcgtgagccattgcgctcagcccaatcaatatctttagaaagtgtcctcgtgtccctgaaaatatgctgtctttgggaaaccttgccctagttgtgtgataaaaaaacgcatgaggtcaaaatatgtgtagcaaatagaaacgacgtcaggataacttaagactaaaatcatttgagaggaagcacgcagacacctgttttggcctatgctaggctttcgggggttaagcttggaatttattcattcacttagtcattgactctaccatgtaattgagcacctagcttaagctggcactgtgataaatgcttagatacaatggtaagccaatgcacagaagtccttcctgctgggaacttcctcctgggaatcatcaagtgggggttaataaataaccacgtaattaaaatcagtgctcatgtgtcattgtctttggaaggcaatatctgagatgccatgaggtgctttggtagagatgcccatgccattgtggaggtgtagtgcttcctgcgaaggctcaagaaatagcctgcagcattgtgtgcgtggtagtggagagagatggggaagggtttgggaagggaggtggcttggggcagccaggaggctgatgccctgcatttccctgggggtaattatgtgagaaagctcttaatgttcaagaaaatccacatattttcaattcaccctggctgcagcctggggaatgcattgggggcccagagtagaggcagggagatacgtcaggaggctgatgcagcaagcagtcccggaagatgatgatgggatttggactcagaccaagtagacagccttggatagatttgaaagccattgagagcatgtcctgatttgggtgtggggcaagaggagggattagtcagaaggagggatcagggctactttcgtccttatggctgcaaaatcacctgggttcactgaaatatggaatactagaagaccagatttggggatgaatttggctttgaagactgggatgctttagaactgtgcagatgtttgctacaacacccactgatggggtctgcctggttccgcctcctttcctatttctctaaaaatggaggttgtaaatgatgagtgtaatgaattgatccaatgttcactttcttccttgcctctcgtggatgtgttaatgaacaatgagaaggtgaaaaatggcatcaggagaggaggaatagttctgcccaatatactgatcggaactaagtgagtcttgaccatagatagaccagagcttggcagacacatagagtttagaaaacattgtgttgttaaatttttaaaaaatatttttatatttctattttaatttttttattatactttttctgggacacatgtgcagaacatgaaggtttgttacataggtatacatgtgccatggtggtttgctgcacccatcaacccatcatctaggttttaagccccacatgcattcagtatttgtcctaatgctctccttccccttgcccctcaccctctgacaggccctggtgtgtgatgttccccttcctgtgtccatgtgttctcattgttcaactctcacttatgagtgagaacatgcagggtttggttttctgttcctgtgttagtttgctgagaatgatggtttccagcttcatccatgtccctgtaaaggacatgaactcatccttttttatggctgcatagtattccacagtgtatatatgacacattttctttatccagtctgtcattgatgggcatttgggttggttccaagtctttgctgttgtaaatagtgctgcagtaaacatacgtgtgcatgtgtctttatagtcgaatgatttataatcctttgggtatatacccagtaatgggattgctgggtccaatggtatttctggttctagttccttgaggaattgccacgttgtctttcacagtggttgaactaatttacactcccaccaacaatgtaaaagtgttcctatttctccacatcctctccagcatctgttgtttcctgactttttaatgatcaccattctaactggtgtgagatggtatctcattgtggttttgatttgcatttctttaatgaccagtgataatgagctttttttcatatgtttgttggctgcatacatgtcttcttttgagaagtgtctgttcatatccttcgctcactttttgatggggttgttttttttcttgtaaatttgtttaagttccttgtagattctggatgttagccctctgtcacatggatagattgcaaaaattttcttccattctgtaggttgcctgttcactctgatgagagtttcttttgctgtggagaagctctttagtttaattagatcccatttgtcaattttggcttttgttgccattgtttttggtgttttagtcgtgaagtctttgccatgcctatgtcctgaatggtattacctaggctttcttctagggtttttatggtttgaggttttatatttaagtctttaatctattgtctttcttactcatacttttcaatttccttttttccatgtacagaaaatgaaggttttattgcgaagtttttaggtctaagaagttccgtctgtttttcttttattaaggaaaggattgatggtcttggcattaagcaagtccaataggattttaagagatcttatcttaacagcaaagcactgaaagtcttcaatgacttccacatccagtaaaatgtgtctctgaggttttattgttcacaaagctgcttcagtttttgccaaccgtccactctgaagtcaatctctttgacttcagttctgccgtctgatacttccccaagtgaactttctggggatgcacctcattgctgtattggcaatgtcatttcagctttttcaccctcctgagtgactagagaaagtccagctagcccctccagcatctttacaagccgttcatgtgttgagtggagtctcatttaaccactaaactattatcatgtctgtctccactcagatctgttgtttattgaccagtgctcaataggtttactgtgtgcatagttttttattttgaaggtggggaacttctgttctgacctgcacatacagaatactgaatttgatgtcttggtcatacacttcagctaaaatcagaattttattctgtctagacaaggttaagaagatgtatatataaccttttgcttgttgctgtgctaactgacatagctgattgtttgaataatttaagccgatcatacagtctgtttatgactgtagcatgtatctgtgaagagctgaccccgtgtgcagtgcagtgttcatgcaggtgagtgtgtttgtaagtgcaggatgggggacacatctctgccctgtacataactcagtttcggtcccagctgcagccaccctgagctggttcccagcaggattagtctttgaggtgggccctcaaagacagggtgggattaatactcagggaatcaaggcaaaggctactttgggagtgtgactgtcagtgctgctgggtcatggaagagtttgaagcatggtggttattatcagaggtgttttcagaagatccttagggagtggtgtttgggaacggtttggttgtgatgggggatgctggagaagggaccagtgaaaacattgtatcagtatcacaaatgattgccggtcagtaaacttgtgaaattgggtctggtcttttttctttctttccttccttccctccctcccttcttccttccttccttccttccttccttccttccttccttccttccttccttcctcctttcctcctttcctcctttccttttattttttttgacagggtcttgcactattgcccaggctggagtgcaatgagggaggagccctcatggcctaaatacctctcaataccatcacattggccattaagtttcaccacctggattttggaggggaagttgtccaggcagcttccaaggcctggagactgtataggaagtttcctggacgttgtcactttctgttgggctgaacttaaagtcatgtggctacatctaactgtgttgggggctggagagagtggtccttgttcaaggctgctgtgcgttggctaaaaatgcacagaaaattagagcaggttttgaggagagctgacagtttttgccacatctacaaaattttggatggggtgggggtgatctaggttgtttattctgtttctaagccactgtagcttctctcactgaattatgcctaccatttgaggagcaaaagggagttttcccatatatcattatgttaggtttgttatggttaacaggactttgttttattcagttaaattgcattgtgtagttgctaactagtgtggaaaatagcaataagcgagagattggtccgttctgctgtctaggaggggacattgactaaggaaaaaagataagtgtaggtgtagcatggtggcttatgcctgtaaacccagcattttgggaggccgaggtgggtagattgcttgaggccagcagttcgagaccagcctggctaacatggtgaaaccctgtctccagtgtaaatacaaaaattagccaggcatggtggcagacacctgtaatcccagctacttgggaggctgaggctggagaatcacttgaaccggagaggcggaggctgcagcgaaccgagatcgtgccatgctttccagcctgggtgacagagtgagactctgtctcaaaataataataataacaataataataggtgattgtgaaaagaagcttataaaatatgttttaagagatagaaaccttttttcttattttggtaaagaacactgacttaagtgatagtgaattaagttgtatgtcaatttgacgtgcacgagggaggagaaggccagttgaatctaagtgactggccagagccagggctgccttcagaggctctgccctgtgtttcctgcctacccttctgggctcacttgcttcctgaaggctgggaatggccttgactttcatgttgccagcatctagcgcggggcttggcacatgatgaggattcatgaaatattcatcagatcatttccaaccaactcccgtgttcaccattagtaacacaaaagtacaacagtagaactatgcaggctgtcaatgcactcagtctcagagcagtattttcggtttatttaggaacaagtatacttgttgaaaaaaattacacagatagttcctaaaattacaaagatagttcatggccatgaactctttacatgtttatttattaaataaatatcatatgctgatgtgaaccgatactttaaatagggttggtaaaatgatctgtaggctgtataaagttttatgttacaaattccatggaagcagtgacttttgtttgtgcttttgtttctgtaatttaaacaatctgtgtttttcccattttctttagacctttttgctacttgatgagatatcacagcgcaaccgtcagctgccgtcagatggtaaaaagatggtgcatgtgcaggattttactgctttttgggataaggtaacatatccttaatgcaagatcatgactgctgaagataatgagtgacattgatttaatagagaattttgaggtgttacacatggtataaaatatggcttgcttatttactgaaactatgttacaaagattctcaaaattaggagtaagttttgcaattaatagaaagtaggtatgaaatcagacttaggtatttgacaagttgtattttatctcattttcaaaaaaccaaggaaagtgttacctcgttctaaactaaatgtcactaagtttggacattggcaacgctggattttataggattggacagactaggggtgcagcatggaatgggttaactgctgagtacattgtagattattacggagactttggggtatcagtgcacattttcagcttagcgttttcaggtcatcttattacatattgagaaagcccatgacttggatttttgccacggggttggggtggggctcccctattccaagcatctggatgttgccagctgctttggtggcagcccaaggccgaggggaggctgcaggccggcgtagcaagctccatggattcctgactgaagggtttcaccgtgtggtaagcggacaggtagttctggcaaggccacaaggatttttcaacacttggtttactcataacatttaggcaaatgggaccaacagcaggggccacccacaagaagtactgaggctcggtgcatctcctgttatccacaactccagtgccctcctcatgcttccaaggaagcagtgggctccctgcccagtgctcatagacgccactactatggcaccagcttttcatgaagagaaaggctgtattgtgagtggaatggcaaggagacaggaggcaacgctcaaatttgtcttccctagctgggggatggggcaggttttataggcagagggtaatgaggcatggtccgattgggtcttgcatgatgccagagctggacctgatcggatcctggatcatgccatgaggcgttcgcctctgaactcgttcctccttccttggtcctagcacttgggttctgcccatggttgcctgcttggttcatctgggaatgctcagattacgtaacttgcaacctgggatccatggtgactgaaaaactgtttactatgttattacacaaagttgaaccagattgggctggttctgcggttacgctcacctgagtccggggtcctctgcaaatgcacttgtctcagtctgtgttagtctggaaaacagaacacacagcatgggagagggaattttgtgcagggaattcgtttcataggtgatgaaagaaagagcacaaagggaaagcaggggtggaggaggccaccccgagatcagccacggcaggaagctgcaccccggggctggagatgatgtctgccaggagcagagcccagtggcccagctgccagcaagatttgggagcagagggcgagggtctcttctgagggtactggaacagctcaggctgcttaaaacaggtgggcagtgctggtggtgaccagctcctcccctctccgggtgctctttgtggctgaccttgcgttgtagcgtagtttgctggagccaagagccaataggcggttgagcagcactcctgcccagccccactgcctccgtcctcccctgtgggacaaatgtcaaaactctctagactccagactcttcctttctctacatgcccttggctctaagtattgcactccctgtttcatgtttgcctaattctgatgtaatttctgccatctctaccaacaaaacaataatgtgttcccagatatttagaacatcatcgcatcttgtgcacatggaaactcacacaaggtgacagtttctctttatctgctggcattcccaccctcatacactttatttatttatttatttgttttggagacagagtcttgctcttttgcctaggctggagtgcagtgctgtgatttcggctcactgtaacctctgtctcccagggtcaagtgattctcctgcctcaacctcgtgagtagctaggattacaggcacgccccaccatgcctggctaatttttgtatttttagtagagacagggtttctcccatgttggccaggctggtcttgaatttctggcctcaagtgatctgcccgccttggcctcccaaagtgctgggattgcaggcatgagccaccgtgcccagctctaatacacttcaagcattgacagacagctctgtgaacatcccactagaaaaaagcactctaggtgaatgctgttgagctagaggaaggcactgaggtagctaccacacactgtgtaggtcccatttgcaaatttcttttgtaccaaaccctgcgatattgtaaaatggtctgttttgttgtttttcggttcctagataacattgacagctgcattgtaaacagaacactccatcctgttttctggccttgtcttggggtgattttgcctcacactggcagggattattagggaggtcctgcggctgagagggtgctggggtgggaggaggggcacagacacgggcttctggagagaagctgcagaggaaagaagggtgtgctgggctgggatttcggagaaagacagagaccccagcagcagtcctgctggatagaccagcaggtattggagggaaggtcttctcaccagcctaggtctcatttataaaacaggggcttgggctgaagctgtaaagtctgtggccccgtgagagcctgtgactctccatggggaagggatttgcttctgctttcttcactgctctggccccagggcccacagagtggaggctcagtctgcctgccttagtgtgtcttggagcctggggaggtcccagagggaatgggcctagccttctgagctgtcgagtgctgcccccttctggctgcagcccaccagtgctgggtcccaggcctcccggcggggcagaaacctgctctaagaaccagggccttgatgggaagctgggttttgcatgtggctcactcttttgcagccaaaactgaataaaaagaagtaaaatcagaagtagttgttaggaaagagacacactgcaaaggaggggaaagggacaggttgaccggttgtgttttttcatccttttgtaatcacagaaataagtaggtttcagttgtcttaagagacagatgttacttaatcaggaatacagagtagacccgttacattttagaggaggaacaccttatatagtaaggcgaagtcaagcaagactttgtgaatttgtgacaagtttgcacttaaaatcgtgtaaatatgtcacattttgtttaacgttatttttccaagtgtttaggtaatgtattacttttttaaaaaagaaatagttgttaggcatgtatgaaggagtaaagaaacctattctgggtggttgttatataattcctatgaaatctggggctaatttctttgtgcttaaaagggatcatgatcgttttggtctgcggccatcctatgatgtggtatgggacacataaggggtcagttttcatacacacatattttagcatttgaccatttatagaaatatttgtgattattcggatatgtgaccattaagtcgtttccaggtaaatttttcattttgaaggttatcttgatctcttattcccccaccgtgctttctgtcttttgggcattttactaattgcacatgcccgcttgagatgtggagaggggttgatgagtaactgtgggctgcgccagctcagtgtctttaggttttgggttggttgactccatgcgtgcttccctcttccatcatcccaggggtgttccacccttcagggacgccagattcattttgaagaatccttttctagagttgaggaggctgcattgcctttgattcattcttgatcatttttctatgatatggatgagcatttaccaaagtgtgtcgtgcagaagaatagccacttccgaaaggatttgggacttgaataaatttgctaaatgcctacccaccagacatgcatggtcaggtctctccaatctatccacgagaaattcagacgaagattataaatgtgctgcttaaacccctttaggattcctcccaaattgtagctgtttttactttacttaacagtatcaatttttgtctactagtgttgatgtctgggtttggacaaaagttcttagagttggcagtttttacggttgaggttctatactctgaatttaaaaccattcctctctttatttgtaccaactgacttttgcttttttaaaagatagataattcaaagtactgattgtccttgtatgagaagaggaaacctcctcattttggtttatcatgctctggtaaactatccctatcatgctctggtaaactatcccttctccctgatacacacttaatcctctcaattgaaaatatttagaagctctttgtaaaagtaatgaatttgatttggtctcctaaataataaactgcaaaataacatttttttgagacaaggtcttactgtgtcacccgggttagagtgcagtggtgcaatcttggctcactgcaacctcagcctccggtgctcaagggatcctcctgcctcatcctcctgagtagctgggactatggcacacaccatgcctggctgatttttttttctttaagagatggtttctcactatgttgccccagcttgtcttgaactcctaggctcaagtgatcctcccacctccatctcccaaaatgttgggattacaggcatgaaccagtccgtaccctgcctaaaacaacttttttttttttaacattagcagtgattgataattttgttaacatttagtatatgtaaaaacatgcatatactcctgaatctttttatcatagaatttatagattgtttaggaacattatttctgataccctaatgagtacttcatcccttcctccctttgtgctggattgaatgctgtggtgggtacctcagtgtttatagtagaactactatgctgtccctattttcccaggatgggtaacacaagctgcaggtgtaacactgagactttcactttgacctatgaacatacacttaatttcattattcttcagtttttggttattgttaaattagagctcttggttacagggttgaccaccatttgtagaagttcatttgccaagagtgactttatagtataaagtgccttctggctggctgggcataactgaggttcatgctttatcaagtgaaaatggaaagattagtggagatttcaagtcatccattagccaaggactgggcatgccatgtactcatgctgccaccttgtggaggttaatgaaatagaatattaaaaccaagggacagaatgaaaatttacaaatggttgaaaagctcccatactgaatattatattaagaatattgccgggcgcggtggctcacgcctgtaatcccagcactttgggaggccgaggcgggcggatcacgaggtcaggagatcgagaccacggtgaaaccccgtctctactaaaaatacaaaaaattagccgggcgcagtggcaggcgcctgtagtcccagctactcgggaggctgaggcaggagaatggcgtgaacccggaaggcggagcttgcagtgagcggagatcgcgccacagcactcccgcctgggcgacagaacgagactccgtctcaaaaaaaaaaaaaaaaaaaaaaaaaaagaatattgttttaaatgagaacacatggacacagggaggggaacattacacatacggggcttgtcggtgggtggggggcaaggggagggagagcattaggacaaatacataatgcatgcagggcttaaaacctagatgacaggttgacaggtgcagcaaaccaccatggcacatgtatacctatgtaacaaacctgcacgttctgcgcatgtatcctagaacttaaagtaaaaaatatatatatattgttttagtaagttagcatgagttttcatttcaagaagcttgtcttgtcatttttactatctaaattttgtggaagtctggagctgtgttcacatgaaaatctggtaaaagggaatgggccttccttaagtactgaagactccaaactgtgtaaaaccccaccaaaaaaatatgattgtatgaaaaggactctaggatacaatatcttaaaataggaaggagaaagatttgggttatgttcatgtatcaatgactgttgtattgttttcttctctttttgaagtgatttgtgtgactttattgaaatgggcacattttataaactttaatttgtaggcatcagagaccccaactctacaaggcctttcctttactgtcagacctggcgaattgttagctgtggtcggccccgtgggagcagggaaggtgagttagaatggcttttggcagcttgttgcaaccccacttatcatattaacttcgtgggtttgagcccaaggctacgtgtaacacaattttgaactgggtacacttggcacggcatttctcagtgcatggaacattcgttttgcaagaagggtcacatgaccaaataaatgtggacaatgcatatcatgtttcccttggttcttcaagttgagcaattgggaactcctagaagttggacatctccatgaaagaaattatttatgtgaccactatgcaggatggattgactaagaaagtgggaacttctttttgtcagaggggaccctagatgctacaagacatctggaggttatgaaggcttgtctgaaaagctttaaacatgttttgatatgacttctccaagtcacatgaacacacatttaataaacctgtagccaggtgtatagtcctgtgttaggagtaaaagatacacctgtaatcaagacccagacgccactgccctccagaagtttctggtatctggggtgagacagatatacaaacaggtgatttcagttcagtgtcgtaagtgctctgatagtggggggcacagacacgtcatgtctgtgcattgtagaagatgtgaaggaaacgtgcgtacagacttagtctcatatattctaaagcaacgcaataaatctagttgtaggtgtataacaaatagggtggtttaacaattgaagtttgctcttcagagacacgattcttgggtatttaaaaataaaagtccttcctagtgcacaggatttattatttatttttatttattcattcatttattcacgtatgtatgtatatttagtttttgagacatggtctcgctctgtcacccaggctggagtgcagtggcgtgatctagagtcactgcaacctccatttccctaggttcaagtgattctcatgcctcagcctcccaagtagctgggattacaggcgtgccaccatgcccggctaatgtttgtagttttagtagagatggggtttcaccatgttggccaggctggtctcgaactcctggcctcaagtcatccacccgcctcggcctcccaaagtgctgggattacaggcgtgagccactgcacctggccaggatatgttatttacatacagcatttctaggattagttctttgtcaaaaaagatacccgcatgcaggaacaatgcattcagtattggatatatgaactatatatgtcatgcttggctactctgttgctgtaaacattcttagttgatctttgttccgtgtaccatttcatttaggggcatgaaactcatttagggaaactcattagggcagagtagattgttacactctattttgttaatattccttataaactactagtttatgtggaccattatgttatttccaatttttaatcacaacttcctgtgctcttttaaatgaatgaatggtgtttttcaagctcccagggctgggcaaggctgcattgcagtggcttattcttgtctcgagtgttgactgaacatgtgcttttttacaatctgtttcagtcatcactgttaagtgccgtgctcggggaattggccccaagtcacgggctggtcagcgtgcatggaagaattgcctatgtgtctcagcagccctgggtgttctcgggaactctgaggagtaatattttatttgggaagaaatacgaaaaggaacgatatgaaaaagtcataaaggcttgtgctctgaaaaaggtgagtgatgacttttggatttcatgtactcgaatgtccagtaatactagtgttcacttgaacaacaaggtttattaacttttttttaatttttaaagacctttgaatgttatttaatactttaaggcggtcctcccagtaaataaacacacacacgctctgtccttttaagtctgatgcgaaaatgatgtttacagggtgaatttcgggggtttggttggttttgtgaagttttatttacttttaacttttctttttttcaaaatggacaattataaaaatttgcaaaagtggagagaagggtgtcttgaacctgcctgtacccattgctcaagttcaagtgcgatcaacttgtagccaattcaactccgtctctcccctggccctctgctagctccacccccaacccagattcttctgatgcataccctcggcctcaattgtattttatctgtaattgtattttatctgtaataccttattacttatctctagaagataagaacacttttgaaaaaaaattacatctcactcaagaaaaaaaatcaccagaatttcttgctatcatcaaccggctaggcagagattacagtgctttagtatctcattacccattggtttgcgtcagactccggaagatgtctgcaccgtgcacttggctgatgtttcctgcttgggtccctctcaaaccacaggtttccttctccactccctttaaaaaagaaaatttgtttcagtagattttggggtacgggtggtttttggttacatggataaatttacagtgcaatttattatttaaaggaaactgttttaaaatttatttttcattgtgtatcatttcaccaagagagtgattgttttcagaaaagatgaagtgtttgattgtacactgaggttttcataaacctggtggatagttgatgaaaactgagcatacttaatagagggctataagttctagaagatagaaaaaatggtaaatactgataaatactatgttaccttctttgggccataaaaatcagtgaataatggcattaaagggctctccccaggccctgtgcagtgtggcctggacatcctactgttcttttatgctgtctggaaaaggccgccacagactgtcacaggtgtgatgcagaaggcttccagccaggtttgtgaggaatgagtaattttgcttgaacaatggctggaatatcagagtctgtcaatcaggtgagtagtatttgctggcgatttggatagagaaatcattgcttgtttaatgggctgtttcttcatcctggactattgttaatgagagatgatgcattttcggaaatgacattaagttagcagtaatgagctagatttttattgaatagtatacactatataggaaaagatgcgctaaggcaagctcctagttattcagatcctaccaggtcttatttttttttctctgtctcacacgctcacacatatgcacacacaaagctgtgtaaagttttaatcttttgccatgatttcccagtgcctttgctattgctatcctcattttgtttatttttctgatattgctagcctcgcttttttaaagtaaaattttcattttattcaaagtttgtacagaattgctaacatttccctaaaataattactatacttcagcttgtcctgctctggtgtccccccactgtcccctgcttccctgaagatccattttagagaaattttgcagaaatatagggtcaaagtaggagaatatacaaggtgatttcagtgtgttgcagtgagtggagtgtatcatgttttagggagttgagaaacagatggcaaattttgctagttttcccccactggtagttacagttgataaccaagaaactgctgatggaccaggccccggagataggaaagatggtacgccatttttcaatggaagggtggcacttggcaacctgggccttgtctttcagctcttttcttccatcatttctctatgacaggttagaagtgaggtccttgggaccaacacagggctttcttgggaaggctttgttgctctttacctactaatctgtcagtttggagataacctactagtaaactctagaatttaagaatgatttgttcaagactgtggtttcaagagttgaatgttgcttctggctggtaaagtggagggttggagagataaaatgactcacttgaacatttgcagttcaagttcaaagccatacctgcctagctccagattccattttcccctctgccaggcacctctcagttgggggtgtttataaggtagaaaactattttaacaattaggtgattgataaaaaggtagaatgtgggacaaaatgtttttcaagccttccctttttacctgttcagcttctgatacccacatgagactccaggtcccaggtcacccagctctgccttgctccttcccacatcagaaagtctctgggggaaagtgggggttaggacagtggctgccattcagcctcttccgtagccacctttgaggactggcccagtaactcggatagtgtcccaggcacctgcgggcttctgcgtggcaggcagactccagtggcaatggggtcccctcagggctgggctgcatggcgacttcttggttccttcctggatgtgtgtaagcatggactgctggccccctgtgcatggttccatcctcggtaggacggtgggcctccggtggtggagaagtcgaacagagcaggagtctggcccagctttgtcatttgctcgctgtcactttgggttttttttgagatggagtctcgctctgtcacccaggctggagtctaatggtgtaatctcgcctcattgcaacctccgcctcccaggctccagtgattctcctgcctcagcctcctgagtaactggggtcacaggtgtgcgccaccatgcctggctaatttttttgtacttttagtagagatggggttttgctgtgttgaccagctggtcttgaactcttgacctcaagtgatccacctgcttttgcttcccaaaatgctgggattatttgcatgagccactgcgcacgaccagctcggtgtccactttggacttgtcacattacttgccttgggcttttgatgtctctgctgagaaataaggacatgggatgagatggtttccaagaaattttgctaccattctcaaatgccatttatgactgtttagcaggggactggaagaaaccagggatcctcttaatgagttatgagatcatttgccgactccttttcaaatccacgtgtcaatggtgggtgttagatggccatagagaatagcaatactggaattattctggcttgtaggtacagagattgcatgtgtaatcaaaacctgctggacagaaatggtcctgagcgtctctgggtgtttggcctctgtttcatttcttattaaatgggggagatacagcaggattataaagactgcaggcaatgtctgtaaaatgcaaacatgccaggtttttggtaaatagtagctgttgcccttttctctaaatcagttaataagataaataaaagattttgccttatatagttcctcattcccctcctggccaccctcccccgcaaaaaaaaaaaaaaaagtcctagaggaaaaaataggaactaacaagatttctcagatatgttgatagcaactagatatattgtactagatacagttgaagtaaatttataagttcatcgagctaaaaatatatttgagataaaataataagataggaagtagtaattcacatttagcagtattgctttaggctaattatttattcaaagagatatcgtagcaaatgacaggacatacctcaggaaacaacatactaatgttagatactttagtgggtagtagttaaaatccgaggccttggggtcagacagctctgggattgagtctcagttcctcttcagtaggtgtgtgattttagctaatcgtctgaaccttagaaagcctcagttttgtcatctgtaaaatagagataataaactattcacctcataggctattgtgaggataagatttgatcatgaacttaaagcatctgattactaggcacataacaggccttcttaattataagagccaccaattttgggtaaaatcacatgaaatgtgacatgcttgaaagaatgtatctgagtatataacttccattatttgaattgatatttatatagggtttctatacatagtacagtaaataagagaataataaaaatattgttaccctaatagatgcaatgtattaatattatgtcaccctttgcatagtttcttttaatccttgagcacttttaagcagtgtgtatccaaaggcatggaattgataaattggagtttaatgtttttctatatagctcacttgactctacaaacccctttggtgtacccactatcttataatttcttctcatatttgccacattcctgccaacttggacattttctttttagattgccttgacaatcataaaataactgttgttatgcctttttgttgttgttgttaatctctcagttgggagaaccatatcactccttagtgacataataggaaataaatgctgagggcccggcgtggtggctcaaacctgtaatcccagtactttgggtagctgaggtgggaggattgcttgaggccaggagtatgagaccagcctaggcaacatagcaagaccctgtctttttttttaaagctgagtacaaaagggatacaatgaggtgaatctaactagggtgactaaatgaactgatagtgctgtatatggatagagagacttcgagttctgagttgtttcagtattgcctttaagtaacttctagcaagcacttggggaagcatgatatgaaagggcaacaggctgtgaactgagatgagcttggttcagactccagccttcctttattaactgagagtcctcagtccagttacgtgctctcacttcatctcagtctcctcatctgtgaagtgtggtcactacttacttggcaggttgtcatgaaggttagagataacaccaggcatcaggaacagtggttggtgcatagctcttacatccaggagctgacctgtggagcaagaagctgagtacacacataaacattaagaggcagaatatggcaggtccttcctaagaaatataaacaaagccttaggaacctagaagagagagtgatgttttctgattgggggactgcaggttagtttcatagaagagtttgagctgggccctgaaagaagaataggatgttgataagctatgacaggaagggccattccaaatggaagcaaggtgtggcccaaagctggagagccctgctctctgactctggggcctcttcttgtgctggggcctcaggcctggcccctgtgaccatccccatagtgtcctcagtggtctttctgcctttagtgtcaccatggttgatgtgcacatggtaggattctggttagatggcgtcaaacccacatagccacgtcatggtttttctctagtttctgtgtctgcatttcagtaaaggtggtggtagattaaataattggttaattttactgagtggtacctaacgtgcatgagataccttcctcccattgggagcacttctgctttctgctcaactgtttccctttagccaaactagaaaatcatggctaggaaattagcctgactcagattgtacttcagatcctttgaaatattttccctgtctgaggcgtgtccataaatagtttgccaagtcaacaacactcaaggtcgttgtagtactcaaagtgctactaccaggcatggggagagagctccttccctattccctgtctgcatgaaatgagacagatatttttagtgtcttttctagaaaatggctaagattgctctgctacaacttgatgctattttgagaatgaaaacaaaacaatgtaaaatcaaggcacagaaacttaacacattatataaagaccatcagcaatggaatgaggccaagtaaacaatgtgtgtttgtgtttgtgtggaaggctgggaccctgtcttaaaatggtgcattgtctttttatgaaaactgaaaggaagagatagtgttaactggtgcattgtctttttttttttgagatggagtttcactcttgttgcccaggctggagtgcaatggtgcgatctcgctcactgcaacctttgcctcccaggttcaagcgattctcctgccttagcctctcaagtagctgggattacaggcatgcacccccatgcctggctaattttgtatgtttagtagagacggagtttcaccatgttggccaggctggtcttgaactcctgacctcaggtgatccacccgtgtcggcctcccaaattgctgggattacaggcgtgagccaccgtgcctggccgcgttgtctttttatgaaaactgaaaggaagagatagtgtaacttctgagctcaacaaagagataacgtgaaataatgaattttcataatggggcacttgctacctttcatttgatgccatctggttcagattggagtattaggggactcctgtgtgtcttagtgggctgccagggagtgggttccaatggaaatactgtttttttccatttggtgatgtactttatttagtgggattcatgctatgaatggggtcctgctgttggtttgatcagaaaatatgtcatagtcatcaatagcaaatgataatgaactcagatccttttttcacttagagagttcatacccttactttagattgttccggcattctatgagtttattaattcttgtttctccaggatattttgtaaaagagataaaatgagaacttagggaggtcagaggatttgcttgtcatggagatctcaatgtgccatttgctttgtctccccggctttgtcagagtagagacaaagaaatgacaccttgatctgtaagagggctatctctgtagtgtcctaggttgatgcttatgcagctcagtcaatacccagcgatgttctccacaccttttgtctatgctaggatctgtctagtgataattataggccatccaagtaaagatttctaatgtaatgtcctgtaacttaaacctgatcattatcctgttattttcagggatgttcttgtcatgtttttttaaaaaagtattatgctttgtccacttatttcttaaataatttttaaatataactttggttggatcctcaaataaaaacttgttttccttcctagcttttgttttttggggtcttgcatggagccagagtctacttagtgcaaccagtctgtgcagtgtctcatgagcactctgctcctttccctttggcttttcctgactgggctgctctttctgctcttattctttgcagttttttttctgtcagtctattgtgatgccttaagcatcactgtgaagatggggcgggtgttatcccttctctgagaatggaaagctgaggcaaaagtcgcaaaatggcttgtgaagacacagttgttccttagtaagtcccgtggctttatgctgacagccctcacggttgggtctccagcacagacctccagactcacttatccagccgcaagtcaggatagccggtcagcatttcagtttggccataatcaaccttttgattttatctcttgaatctgcgtccctcatttcccccagctcagtaaatggtaaccctgttcttcccttgtcttacaccaaaaccaatgcagtcctcctctttttctatcacaacacaaacccatctcatcagcagatcctataggtgctacctttaaaatttgttcagcacatgaccactgatgttcacttccttgttccccactccggtcccggctactgttgtttcttgtctcaattattgccttgatcagatcatgtccttcctcctatttccctgggtgtgagcccttggcttctcttgcctctgtctctgccctcccctgccatcatcctgtgctcgcagttccgtgtgcatccatattgctcttctgtgaacaccttgggcacgtatcaccccatgggttttgtgcttgctcattcctctatggagcactcttcctgcactctgtgccagccagtccatcccctgacaggtctctgctcagaccccctcgatcagagcccttgttgacctccctatataaagtggactttccctctgtcactctgtctccctaagccagcttccttctccttcttagcacttatcacctcttacatttgtgtcaatcttttattgtcaggtcactcactgtggaaactctttcgctgctgaattcacaaggagttgctgctcaaaaaatttctgttaaaatggctcagtgcataaatgctatgaaaagctacagcattaaaatagataacgtgccctgactgtgtatttgataggttcaaacttacaatttagttactatgaaatatttccattgctgttgatcaaatacatgtaaatttctgaagaactaatgtgcaaagtttaggataactttggaagaacacaaagaacagaggaagaacatgttttaagtctctttttccccccttctttcctttgtccatacaggatttacagctgttggaggatggtgatctgactgtgataggagatcggggaaccacgctgagtggagggcagaaagcacgggtaaaccttgcaaggtaagttgcatttcagcagccactatgccggtgtcttttgataccttccagtggtggtgagcacataggacctgcttactgtgtattgcgtcctgtgtgaagcaccttcttgggttattctgttggcatttgaatgaacatcccagttgttgaaagttgtcatgttcctgggtgagagtctgatacctctttgtattttctagagcagtgtatcaagatgctgacatctatctcctggacgatcctctcagtgcagtagatgcggaagttagcagacacttgttcgaactgtgagtgtgtttgtgtcttaagtcatttctgcttttccagagccatttcgagttggctcaggaaagcctttatggctttcagctcatcctgctctggtgtccgctcccctccccacactgtcccctgcttccctgaagatccattttagagaaattttgcagaaatacaaggtcaaggtaggaaaatacacaaagtgatttcagtgtgttgcagtgagtggagtgtatcatgttttagggagttgagaaacagatggcaaattttgcaagttttcccctactagtaattacagttgataaccaagaaactgctgatggaccaggccccggagataggaaagatggtactccatttttcaatggaagggtggcacttggcaacctgggccttgtctttcagctcttttcctccatcatttctctatgacaggttagaagtgaggtccttgggaccaacatagggctttcttgggaaggctttgttgctctttacatactaatctgtcagtttggagataacctactagtaaaatctagaatttaagaatgatttgctccatagtagactgtggtttcaagaatctaatgttgcttcatggattcttaccagagtgaacacttaaaacccacagacatgtaggcctggcttgcctttgaaactagttgtctagaatctggcttccctcccaactcttacgtggtgtttctgggattttctttctttggctcttgcttagacactgagccatggaggtagaactactctggaatcttttctgtatattctataaactcatgtgtgccgactgacacttcctacatagtctagactggcctttttgaaagcattgtgaactggttttgccaaaacagcactcacatctgccccacagtcagcttcctgtttttcgccttgttaaagtcagtgagcctttcccactcattgtaacccttctgcgcacactgaggtagatgctcctgcagatgctactgcatgaaacatcttcgcttgcagaggagggcagtcagccacagagaagataagcacccatgctgggctgagtgagagagagacaagttcagatttcattcttgcccataaggaatttgtctctgcatggatcaagactaagtgcatgggaaaagttcaacagaccccaaggcttaggggatttcaatataggacaatctattttattattattatttttttagataggatctcgctctgttgcccaggctggagtgcagtggtgcattctcagctcactgcagcctcgacctcctgggttcaagagattctcctgcctcagcctcccgggtagctgtgactacaggctagcaccaccatgcccagctcattcagtgtttttttgaagagagggggctttgccatgttgtctaggctggtctccctatgttgcccaggctggtctcgaactcctgggctcaagggatccaccccccccccccccccacccctgccctcggcttcctggagtgctgagattacaggtgtgagcccctacacctggcatacgacaatctttttttttaaatggaagaagtgggcagcagagattggaaaggtcactgagggccgggcttggctggaagtagcctgtggtcctgcaggctggtaagggtttgtggtggctgagagtaggattcaattcctttgaaagaaatagtagaagcagaggtgtgcagacgggaaggagtgaggcctgtgggaaggacagcaggcaggcacctgttcctgtggtgggggatagagaaggtaccgtgagagaaagctctggaagtcctgtgttggccagccagggctgccctcacaaaatgccacaggctggggggcttccacagcggcaggttgtttctgcagagttctggagactgcatgtgtgagatcaatgcatctgcaggtgcagctcctcccgagggctttcttggcctgctgatggctgccttctcacccttttctccttgtgtctctgtatccaaatctcctcttcctgaaaagacaccagtcagattagagtagggcccaccctcatggcctcattttagtgtaattacttctctaaaggttctgtgttggccgggcactgtggcccatgcctgtaatcccagcactttgggaagccgaggcaggcagatcacctgaggagttcgagaccagcctggccaacgttgtgaaaccccatctctactaaaaatacaaaaatcagtggtggatggtggcgggtgcctgtaatcccagctactctggaggctgaggcaggagaattgcttgaacccaggaggtggaggttgcagtgagccgagatagcgccattgcactccagcctggatgacgagtgagattctgtctcaaaaataataataataaaaaaaaaattttaaaaaaggttctctgttcaatttctaaggtgctagggtgagggctggaacataggaactttgaggggagcatggttcagtccataacaagtcctggatagcaaagtggatagcgagtcggctgtgtgagagtaactcatctctgggctctggattccaggggtttggacatgaagtcatccactgagcatggggctctacgtgggttcctgaacgtttacccaccagagtgcgtatgcaaaatgtgcctggtatgggatgatgaagtggatgtgtatgatggtgatggttgcacaatggtgtgtatgtacttagcgcgaccaagctatacaattaaaaatggtgtaaatggtaaatgttatgtcttgtctatttttccacaaccaaaaaaaacgtggatggcagcattgaatctttctgaatgcagagtgcaggataagctggcacttggcattgccgcagcagtctgatcagagcctcgtttcctgctccctcctcattgtgccttgatgaattttccatttcgccgagaagggcctctgtggcttgcttgagtcttgcgcgaggccccaccagttctttatcactcaaacaacaattcccggtgggacgctgtttagagtcgccgcggggaaggaggaaggtattttcattgctgagtatcagtgtgcgtatcgcacaagctcccccagattttcatttgaacacaggaggtatttataaagtcctcttgcacctttaaggattaatgactttggatatatgcttgttagaagcaagcttgttaaaattgttgtttgctaatcagaatcacattctttggggaaacttagggcagggagcacgaatgcaatttaggaaatcactcagcagcaactggagaatgttctcaacgagttagaaaattggattgaacaatatgctatgaaagatggcggttgtgttgaagcttagaaatgtgaagtgttttgtattaaaagtgaatgaattacgcttctatttgccattaacagttttacttcaatcatgaatatatatcgagagttgttaagagttgtgttttacaactatatgttgcaaacactaagtggattttatcacatacaaaaagtgagggtcacttagattaaaggatgctaatccaatttgttgcctgctatagatgtggttgtgttctagaaagcctcaaattctcagacccctgcctctttgagtctcctaatcagatctcccacactgttgcctacctatttgtcttagtccattcaggctgctgattcaaaatagcataaactaggtactccatataaacaatagaaaattgtttctacagttctggaggacaagattcaagatcaaggcgccagcagttttggtgcctggagagggctcacgctctggttcatagacagctgtcttgtcactgtggaaggggtacggcagcttccctgggctggccccttctactaataccatttgtgttggcagattctcatgaaataggcctcacctcctaataccattacattggtgattagggttcagtaggaatttggggagggccacaaacattcaggcacagcactagttcaccttccctctttcaggtcctctaggactcccctacttttaagctacagttctaagtcctcgaatggcaaattgccctttgcagtctgccccattcacctttccaacccttgccatgcaagaccagtcctccagccatgcacacttctttggggtgcctggaaggaggtgtgaatttctcacgtctgcctgtctgtaagggtatttttcctgccgttggacaaccagggatagtttgcctgggcaaaagagaaaaatgaaagacacagatcctacctcctgcctttctcttctgctcctcggagggcatggcgctttctctgtcttcccacagccctcaatgagctgctcttgatccacctatgtgttcttccctccagcccccgcactagactgtgaatgcatgaaggtgcctttgcacagcgcatttgtgccccgggaccattgcacctgctgtatctgccaggaatgcttcccccagatagtctcatggctcatacatcacctccttgcagagaggactttcctggccactccctctaaagtacaacctttgcctggctgtctcttcatggtttactttactatccaatagtgtgttttctgtgtttgtgtagtgagtgtccctacacgactcagggtgttgtctgtttgcttgaccagtggatgtatcctcatcacttagagtagtccctggtacttcgtcagtgctcagcaaatgtatcttaactgaatgaatgaaggtagtgactgtatctgtccctctctccctccctccatcccttccttccttttttgacagagttttgccctgtcacccaggctgaagtgcaatggcatgatcacggcccactgcaacttctacctcctgggctcaagtgatcctcccgagtagctgggactacaagtgcacaccaccactcctggctaagtttcgtgtttttttgtagagatgggatctctccatgttgcccagactggcctttaactcctgggttcaaaagatcctcctgccttaacctcccaaagtgctgggattataggtgtgagccactgcaccaactgactatatctttctcacttgtgtcacctccaacattgtatgtgtcagctcttaatgttgtcttttttttttttttttcctttttgaggcagagtctcgctctgttgcccaggctggagtgcagtggcatgatcttggatcactgcaggcctcctgggttccagcaattcttgtgcctcagccagccgagtagctgggattacaggcatgggtgaccacatccagctaatttttgtatttttagtggagatgggatttcaccgtgttgcttgaactcccgacctcaagtgatctgtctgcctcagccttccaaagtgctggaattataggcgtgagcccccgtggctggcctcttaatgtagtctttatgtaggattagagttaaatagctcattgctacatcaatcacttattatttgtttgttttatggcatgactggaagatttttactcttaataatttggaaagtattttttgagatttgcctaagaagcataatttagaaaaaatttcaagccatcaattacaatgttagtgtaattatttctattatctcatctacaatggaagatgttaggaagaaaacattttgaaacctttgagttggctgatactggacatagcacccatcagatttgatcattaacatctccctttagatatgtatataaaaggactaatggcagccaatcttgatataaagggaaacagtttcattaaaagctttagtactaaacctgaagaggggtataagtactaaacctgaagaggtatactagattgaacaacttagttttgaaataagccaaactaagatatgtgaaaggggaaaaaataatccttttggacgtaaaggatgaagtgatagtttacatatctgcagtctggagttgtggttctgatcacaggcactgtctctaaaatacttgcttatgacttctcagtcctgaatttctaaaagcagtggctgcatatgaggaagactggaggacagggctaacacttattgagcatgagttatgttcttggcccttgttacagattaatgcttttcttttctttttcttttttttttttctcctttttttctttttgagacagggtcttactctgtcaaccaggctggagtgcagtggtgtgatgacggctcactgtagcctcacctcctgggctcaagtgattctcccaccttagcctcccttctagctgggactacaggtgtgtgccaccacacccggctaatttttttttttgtagctcccaggagtctacgtttacaatgtaggagaactttgagtgggtaccgtagaaaacaaacaaacgtcagaaaacttgatggttgaatactgaggtgggtcttatctttgagccatatggtttggactgtttggattctgtttttccattttcttattcagactgtttaggactaatgagagaagttttgcttcctggatgagaccaagaatactgtggagagtcacatgtcactagcatttgttttcgtatctagtattatttttgaagaagagtctggaaaatgcactctggcaaaggttaccaagaatctaagcctttttgcggggggtggagggggggcgttgatatgtgcattataaattatcatctaagaaaccgtccaagaaaaatgccgcgtcgttacgtgacctcgatctttctttctcccctgcaatcctacacggcaataaaataattagtgttttagttaagtcaaatttttgaatgtctatgttaaactaagttttaggaaaaaaaattacacttattgcctccttcccagaaaacttttgaggatttcaccacagcaaggctcgtatttgctgctagtggttttgaggacctagccggctttattggcttatatttgtatttagtttgtatttaacctctagatctttgactactgtgttgtctttgactacggtttcaaaatgtatgtttttcaatgtggagcaccccattcatgcattttttcaccctgtgccttttacatttataggtgtatttgtcaaattttgcatgagaagatcacaattttagtgactcatcagttgcagtacctcaaagctgcaagtcagattctgatattgaaagatgtaagtagtttctagaggtctcccgaacttgcaagtacttgggtgtgttgaatccccttcttcttcctccatttcatgttcctttcttctcagagctgggattcatgtttttaagtattaactcaaaagacttgtagaaatgtcattattacatgctaaaccatattaccgtaaagtatgtaaaattgctacctcaaggttactacattgttaaagaaaatgatgctgttttaatttagaactttttgtttacctcttccatgacttaattcaaattgtattatttggaaattacagactctaagacctgtttgtatccctttaattgtcatgcatagtttggctaaagatcctcttctattaatagcagaaatggctgggcacagtgactcaggcctgtaatcccagcactttgggaggccgaggcaggcagatcacctgacgtcaggagttcaagaccagcctgtctaacacggtgaaaccccgtctctactaaaaatacaaaaaattagcccagcatgatggtgcacacttgtagtcccagctactcaggaggctgaggcaggggaatcacttgaacccgggaggcggaggttgtagtgagccgagatcatgccgttgcactccagcctgggctacagagtgagactctgtctcaaaaaaataaaaattaaaaaataataataatagcagcaacacagttggataactgagcaacccctagtcacagcacccactttcctggaatagccagcagttagtgtcactgcacaggaatttttgagtgcctgatatgtgtgagagctggtatagctataagtaagacaaagtccttgccatcgtcgggctgacattcttcctggagatagatgcaaggaaggaaatggaggggtggggttgcctcgctgggacttgaggtacagtgacgtgaaggtgctgaccatgcggtcacctggggagggcatctgaggcaggggactggcagtggggtcctaaagctggaagttacctggtgcatttacaggaacatcagggaggagcagagcaagccagggagagcctggagaaaggtgggctcagagcagttgtcagaggccctggaactaggacagaggctactggacagtccagagcagtggagtgacatggtttgatctgtgattttaagagatcctctttgttgttggctggaggagctacagcagaagtaatttgaagtcttagtggttcacaagacagaaataaggggttggtctagtgtgtcagtttcctagggctgccagaacaaagtgccacacattaggcagcttacaacaacagaaatgtattgtctcactgttctgaggctgcaagtccaaaatcaaggtgtccgcagggccgcgctctctgaaggcttcaggggagaatccttcctcgcctctcccactttctggggttttgctggcactcactgttgatccttggctggcagtgcagcccttcagtctctgcctctgttgtcacatggcattgtcgctgtgtctctctggctttcttcctataaggacatcagtcactggacctagggcccaccctactccagtatgacctcatcttgtcttgattgtatctgcaaaaatccagttttgaaaaaaaaggccacattcacaggtaacaggatttaggactcgaacatatctttttagggggtcatggtcaccattcaacctataagagctagcgtggccggggacatggaggttagtgagaacttctcagcccagcggtggtttcatgcagcactccttggcttgttgcctcttgcctcagtaccctggtccttaacccttctctgttccaggccctggtcaaattcctgattgtgggtctgaaacccgcttagtgtcttcaaatgttttaatgtttctcctcctgcaatttcttaataaaacgatggaaataacaaaaacgagtgttaattatattttataagatctgtgtgcaccgttctccaagggagataaatttcacattattgcaacaaacggggtatataatgatagcaaagctcttgcaagtcttgtgtgtaagcccctccttgctgcctaaagaacagtgaggaatctgtccactgaagtcccggcaagtgaattctcacccttaagaggattatcgaaggcagaactgctgcctcttcagaagtggttccgtgtgctggctcttccccactcccccaggaatagggagcctgggttcctcaaacttgaaaacaagtaatttcttatgcagagggctgagactagtgtggcaaaacctgaatgctggtacattagagtaaagtctgtgggtggtagaataatctttctccaaaacaaccatttggcgaggcgcggtggctcatgcctgtaatcccagcaatttgggaggtcagggtgtcggggggaatcacttgaggtcaggagtttgagaccaacctggccaacatggtgaaaacccatctctaccgaaaatacaaaaaaattggctgggcctggtggcgctgcctgtgatcccagctactcaggagcctgaggcaggagaatcacttgaacctgggaggcgaaggttgcagtgagccgagatcgcgccattgcactccagcctgggcaacagactgagaccctaccacacacacacaaaccatttttccactggtgggcacccaggatgaatgtgtgtccattcttgcttcttgctgtcgacccagccccttccctaacagcagacagagcacggttccccctcggaacccactctgcattgctcctcagtactcggcttctgaggaaaattgccatctcagtaccagtaggagtttccttgtgtgtcttacagatactatgtgaaaagtggtcattttatcaaactaggtgtgtcacttttacctcctgtgtggaagaagacacaatgtatcatgaagcatttttgaattctccagttatcaaactggtccaaagggcccaaggtgtcgttggattttcctcagtggacccaccttttgggggtggggaggattggggtagcagggagggtcctggccaccttcccccacctgacttgccttagccaggagctgctctcctttgatttgttttgtattctgggagtttgcctaatattttgtttgctgctgtttgaggaaatcagttgggtctcatttcatggggtacacaaatagtaaagatatttgtacattattttctatgactttgtaaggagagaaaactgtgcaaggttgtgtcccatggaatgtcgaattttcagttaggaactccctgagtctttggggcaattatttatttatttatttatttatttatttatttatttatttatgagatggagtttcgctcttgtcatccaggctggagtgcagtggcttgatctctgctcactgcaacctccgccttctgggttcaagtgattctcctgcctcagcctcccgagtagctaggattacagatgcccggctaatttttttgtatttttagtagaggtggggtttcatcatgttggccaggctagtctcgaactcctgacctcaggtgatccacctgccttggtcttccaaagtgctgggatttcaggtgtgagccactgcacctggcctgtggggcaattttagagtaaagaccgtgaaggtgcagttcatggggtctatgtccaagtctggttcccacacgcctttttccagcagggcccatggccagtggaggcttgtggagtgcttcctacctgtgcagatatgcctgttcctacctccctatcagtgttaggtttctttcctggaatatcctcctcaatttactcattccttcaattcttattgcataaggtttatcacagttttcatgttctgtaataagactaccaatacggtcaccaacatctgtgtgataataatcgccatttgtaacacactattaccattttaaaaatattcttcaggacctaacacagagtctggctgagaacagaacactcagttgtgtatcaagttgaattgtattagatttgtcaactaggattccggacctaagtataatcataacttaagatcagttactttttctggattagaattagattaggttaacattatcacctgcacatgtatctctctgaaattctttatttttattttagggtaaaatggtgcagaaggggacttacactgagttcctaaaatctggtatagattttggctcccttttaaagaaggataatgaggaaagtgaacaacctccagttccaggaactcccacactaaggaatcgtaccttctcagagtcttcggtttggtctcaacaatcttctagaccctccttgaaagatggtgctctggagagccaagatgtgagttcacctcctgttacaacatggcctggttttgttcactgttaatggccttatggatctttggtctactctgttcaaagcttcatcttttgtcccaaagtggattctgtggtttcagggctctattccatgatattggtagattaaaacggaaccaaggcaaaccaccctggttggagttatcctttgtatgtaggctggggaatgtcaaggaggtgagtagcgggtgtgtatgctggtgcaagtcctaagctgtgtgtgactcacactaatactacaattcttgaatttactgtagtgaaatcctacttagtctggtggcccccgacttctctttgcatctggaggcataatttgaagacccccttagagaaagtcctgctgtgggccacatgaaattagccacttttcctgtatgttggaatgttctgatgctgcaggtggctgatggaggtattttgccctgttgtcagatggtttatgttagttaggccagaagtagcatgtgcaaagacccaacagttcctgacacacagcagcccaacttccttctttacctttcaagaataggagctgcatcttactcaccttggtgttcccagtggccagcatagagctgctcaatacatcttcagagtatgtgaatctcatgccttctaagtcctccgggcagaaatgtaccagagctcacttaaaagcatagatattccttgccacacaaaccctgactatccaaatccaggagactgaaggattcttgcagatattcagattaggccctcacatgccaaattatcaggagtcaatttctgaaactcaggaaccaaatagattaggatcatatgctatcccttcctttccaaactctggttactgagactcactgcttgaccccagttactgtgttgagctcatgttttgaccccctgctcttttatgtttccatcttgagtgatgcagttgagagttccatatctttttgtatatgattttggaacaagtttctgtattgacacttgaatttgggtgtgctaggtaagtgctgaacatcctgatggcatccttccagcaagccacgccacaatgtccaaatgatatttccttatctctagtagaaccttgaaagtgggatggctgggtccaaggattagtgcatatagctgggtgtggtggctcatgcctgcaatcccagcgctttggaagtccgaggtgagaggatcacctgaggtcaggagttccagatcagcctggccaacatggtgaaaacctgtcttcactaaaaaatacaaaaaattagccaggcgtggtagcaggcatctgtaatccctgctactcaggaggctgaggcaggataattgcttgaacctaggaggcagaggttgcagtgagccaagatcgcgccactacactccagcctgggaaacatgagcaaaattctgagtcaaaaaaaaattaaataaataaaaaataagtggatgtatagtttggctagctatttccacacccttctccacaggagatggatcattttggacttctgcctgtttccccacagctttgtcaacagagtgcattgtcatctttgggaacagttttgtatactgttttgtctcttaccaccttttttcctctgcagacagagaatgtcccagttacactatcagaggagaaccgttctgaaggaaaagttggttttcaggcctataagaattacttcagagctggtgctcactggattgtcttcattttccttattctcctaaacactgcagctcaggtaaataatgacatttgttttgcgccctcaaaatgatatttacagtacctatgtttatgctattatgactgcatcttgcagttcacttggggtctgaattgaaatgtgctgtctttggggaacaaagtgagggctgcctactggtgttccatgtccgttacaaagacctgcgaaaaaagggtatctttcaatgattttaaaatggaatatgcattttcttgaacccttgatatctgggagtttgggcttggcacagacctgagctggaagaactatgcgagttctctgagccttttattctttctttctttctttctttctttttttttttttttttgagatggagttttgctctgttgcccaggttggagtgcagtggcgcgatcttggctcacttcaacctctgcctctggggtttaagcaattctcctgtctcagcctccggagtagctgggactacaggcacatgtgccaccatgcccagctaggctaatttttgtatttttagtagagatagggtttcactatgttggccaggctggtctcgaactcctggccttaagttgatccgcctgcctcagcctcccaaagtgctggggtttacaagcatgagccaccacgcccggctttgagggctttctttcggttgtccatgttagcgattgagagttttgagttggtaagtcatgcccaagtttgatttttgtctttgttgtttctcccctcctaggttgcctatgtgcttcaagattggtggctttcatactggtaagttatttctggtctgatgtatgaaatactccaaaatcagtaagaagactcgcttttccatagagttagagggaggtgtttgttgatccttctcttctaatcctcacttcgtttacccgaagaaaaattagagtgcttgctggtggagtgtaaactgcggtggtctccacccatgtctgatccgcggcatcatgttcacagacagtttcgggaactgaaagttgtgatttaaattgaatttttataaggtagatatacacaagactaagtgagctgagaatcattttccagcatgaagcgtttctcccaaattgtggttcatttttaaaaaaatgtatttatctaaatttcatatatagcttaatatttttttctccccatgttccatagggcaaacaaacaaagtatgctaaatgtcactgtaaatggaggaggaaatgtaaccgagaagctagatcttaactggtacttaggaatttattcaggtaaagtttaatcatttggtgtattgtatgagaggctgaggtgcttacaatgagcctgtgtgagtaactagggcttccaggagtcattcagtaatgtcttaacagatcaggagtctcagtcgaatttactctgtgaattaattagaataattattttaaaaatctactagaagagaggttgactgaagactcttaatttgctctgtactggattttgaaagttaaaccaggattgagcattcagaaaatcagccactggaaatatgtggctattgtctattctaataggttgctttagctaaatcttatatcattatacggatgggcagggggattagaaacggatctccaccctgtggttcggatggttccaattctgtctaaataaaccctggcttttattgaacttggatgaaatcctctggcagcaaggcccccaaaataaaagcattattccctcccaggtatgcaaagctcccttcagcactgctcatctcctgggcttcactaattacttaagagggaagctgagcagggaaaaatccagtgtctgggaattaggatgccttctatttcttaccttgagatcacaatgttatcgcgtccccaactgtgtgattaatttaacatttggcttgccagactaatattaacgccacactctgttttcacaagagtgcttagaatgtatgtagcattacatactgtttaaagaaaatcttcatctaaaattttaaatatttccacaggaaatgctcctacaagctttcctcagagatagagtgagttatctttgtaagaacctactcagtgaaatttggtgtttatttcatcgatcgcttgctaagaaatctaaatctgttaggtgtttaccttccaactgatggactatgtggaaactaaaggaagaaggaaatctattatgttctattatgttcgtgtaggatggcaggctaaggataatgcccgttgatggagttaggaatttgagctgctttcagaggttaaataacagtgacatgtcatctgaaagggaaatatttgttatagaagttacccccactgtatttagcattgtgaatgaagagatgttaggaaagctcttttaatttctatgtgaataatggatcctcattcatgtcttaataaaatgtatgatttattttattcatttaaaaatgtcttgtgtctatgtaaaacagtgggggattagttgcttatttagattaattatcttatgttaaaatataatttgtgttttcttgcaattcaattattcaagaggttttccacatgcaacttaatacggtatttttaaattctttaaagctacttgggcattttctacaaggaaaaggtaaatcatttctcctattccttgttaatatcacatgttggtatcaaaacataccaccttttttagattatgggacataatgtaagtaataagatttggaatatggagaagatcaactacacttcatgattatctatcctacttctgagtttttaatagaacttgcaattgaattagagcctagaatgaaattgtattatacacctgatttttcttttctgtgcagtttccattcagtgagagaaaaataaactattttaatccttctttgtcaatgtattttgtaaatacattatacttatgtagaatccagatgctttatggaataaattaagtaacatctttataaactacctggcttgctttagcaactattgaagaaaatgcagagatatgctgtgttctctaagtgatatttctttatttcaggtttaactgtagctaccgttctttttggcatagcaagatctctattggtattctacgtccttgttaactcttcacaaactttgcacaacaaaatgtttgagtcaattctgaaagctccggtattattctttgatagaaatccaataggtaagtctgacaccaagtttctcagtaagtatgtcttgttaacaacacatttaggatctgattacatttccatctttgaaaatggaagggatgctgggaagaaaatcactatgcatgttgattcattttccacaagaaacttcactgatatttttctcctaccagagaaaatctaaatatgcggggggaggggggggcatacaatcttttattccaatttatatgtgtgtggaaaaataaatgaatgttcactttgcagaatgctttaggaatccatttgctgtgaggcaagtgaagcatcctgcattccctgtaaacatgtttaaatgtagttgaatagttgctaaacattggctgtgtttacatagtgttaggttatgccatttttcagagggatctttgtaatcaggaatgctctgacgtgagacaggccgtgcatttctttctttcattgggaaacccgttcatttctggaaacacagggtttttgtacataccctgactgtgaggtttccctgaaagataatatgtggttaattaaaagccaagattgataaaatgtaaactccccttcaagaacagtttctaactctgtggttttgaagtagacttttggttctataatagagactttgttgaacctgccatatagatcttcagtagcttgtttcctaggtatacccaactatacccagtattttccaagtggttgatgcctctgcactatgcgcttcttatctgtcctgcttctgaggctagccttcctgacctgggttcctagggagaattagttgtgcctataagtccccaccctgctcagttgagtggacttgtggggaggcctgagtgacattgtgcaaatgataactgccctcatagaagcagggaggtggcctggagagaacacaggcacagctttggcctggccattgactagctttttgaccaaggccagagcacataggtgctattacacaggcaagtctccaagcagatgctgtagttcaaagtgtgaactcaagctaactacctgggttcaatcctggtgctggttactaattgttatagctgattatagttacattcatattcatgtcctagttacttaatttttctgtgtcacagttttcttatctgtaaaatagggatactattcatacccaccaaattgaaatcttatgagaattaagcatgttaatacattcctagcacatgaaactgggtgtagcaacatggtcagtgcctaacgaatgttagtgacaatgaagccatgtatctgtgaactgaatcaccttcactgtggggtggaaattactcctaccctctctgttttacatgatttttgtgaagattaaagaagactgttctggaaagcatcttgtgtagatttatttaacaaatacttttcagtccaagcactgtgcaacgtgcaaggatttgtaaactgcagagaccacacaaatatcggtctgatttcagctgttattagaaagtcattggaggacctctgcgctattacagctgtaacgttgcgccactttgccagttaatttgaaactacagtcataacatttggagcattaagtgggactgcctttctgttatcacaggcctcggaatgctcatgactaccattaaccagcctctccatgtttgagacctgtgggcttctcctcatgctgatttatttattattcagggatttgggacccagtctaaatcttggaggtgactaatcttacagcagcacctgagtgtttatcttgcttcctcctcctatatctattagcatgactttattccttcaacaaaatagaagcccaaataagtaccccaagagaggtctactttgtccaaaatgtttagaggtcatgaattatttactttttttagtggtagatgttgaaaaaatgtaaaaattaaaagttttttaatggtagaattaaaattttcatttagataaaatttttgcactttttacaatggtgaaggatacacaaaatctgtgaattacgcctcagaattcacattactgattgtatgcacttcaatagttatatatatatatatatatatatatatatatatatatatataattaaaatttatttagaaataaggtctcattctgttgactagactggagtgcagtgatgtgatcacagctcactgtagccttgacctcctgggctcaagcgatcctcctgcctcagccttccaagtagttgggaccacaggcctgtgtcaccatggccagctaatttttaaaatttattttattctattttgaagagatgggatctcactatgttacccgggctggtctcgaactcctgtgctcaagggatcttcctgcctcagtctcctcaagtgctgggattacaggcatgagccactggacccagccggctttataatataaataaaaattcccctctatgatagtgaggcaggcatgctcgatttttcagtactcttaaacatacatgttaaatatgtataagtatctggcatgatgttgtgccccctgaattgcagagtgttctttgagtggggtagaaagactgggaagcatgtctgaatacttagttattaaaagcaagctcttagaagagccccgggggagtttcctatgagctcagcatcctgatattctcccaggttttagaaaacttaggaaacggggaggacctctgctggcatgtagtttccagtaagctcaccttgggatggtgactggcacagaaactccaggtgattcacaccgggggtctggctagacgtccctcatatccccatctccagtgcccttgtgctggaatattctcagtgactctggtctgcagcatagaaatgtcttctccattattttatgtccactcccaccccagtgtgccatccccctcatcatgcttctgcccagatcctcatctgtgtggttaatgaatgggcgacccttgctggtgactcagagaaccagaccttctggaagggtccccctgactgccccactgtggtcccaagttcacttatttggatttagggagaaggggaaggtaaacctggaaggtctgtgtttcttctcagcagcgaagtttctgtttcttttttttttttttttttgagacggagtcttgctctgtcacccaggctggagtgcagtggcgtgatcttggctcactgcaagctctgcctcctgggttcatgccattctcttgcctcagcctccagagtagctgggaccacaggcacccaccaccacgcccggctaattttttgtacttttttagtagagacgggtttcaccgtgttggccaggatggtctcgatctcctgacctcgtgatctgcccgcttccacctcccaaagtggtggggattacaggcgtgagccaccgcgcccggcctgaagtttctgtttctaggaaggccacgcttctccaacatgccagatattaagttcctctccatttcgaacccacctatggttgcatgaaattcatctttgtttatataatacaatacctttttatctactggcctttcgttaacctgataaatcttaagctagcaggataaaatgtgagccaaaccagtgtgctgccttagaatgacaagagccagttctctctctctttctcttttctttcttttcttccttcctttcttttctccttccttccttccttccttcctctttcttcctttcttcctgctctgttgcccagtcgagtgcagtggcatgatctcagctcactgcaaatgtccacctcttgggttcaagcaattctcatgtgtctatctcctgagtagttggtattacaggtgtctgccaccacatccggctaattttttttttttttgtatttttagtagagacagggttttacctcctattggtactgagatagcagttttcccaagaagccaagtactgacgagcaatgtggagctgggtctgaggggcaaccatgctctgtctgctgttgggagcgggctgggcccccagcaagaatggacacacattcatccaaggtgaccaccagtggacaaatggtgactgtttgtgtgtgtgtgtgtgtgtgtgtgtgtgtgtgtgtgtgtggtagagtctcactctgtcgcccaggctggagtgcagtggcgtgatctcagctcacagcaacctccggctcccaggttcaagtgattctcctgcctcagcctcccgagtagctgggattacagtgtccaccatcacacctggctaatttttgtatttttagtagagatggggtttcatgatgttggtcaagctgatctcgaactcttgacctcaggtgatccacccatcttggcctcctaaagtgctgggattacaggcgtgagctaccgcgccctgccaagagccggttttcctttctcgtctttttatcctcctctcacccattgctagtttttattctttcctcttttgatgtaggttggtgatgggatcacgtgtgtctgttaagaagccttacattttcagctgccctcggacacctccttcatattttgattatgacctgagttgaatagggcatttgcagatattttctggtactgttcgctgcatctacctcttcctagtcagtttttgtgtgtgtcttagccctgtttccgttctgttccaatcataataaatgggtaacacaaatcctaggtcaagagtaagtcttcagaaattaagagatgatttttattttaaatgtaaatcctgttttcctggcatgggcagaattaattttgcttttgatatccagcacaagagggcagcatgatctgcagtatttcagtgatataatgtaagagcacctcattgcaaaacctggtttttaatttaaagctttcttggaaattctatttttatagcttgggtctttgtatcttgatatgtgttaatatgaaatttaaaaagtaatattgtggcgtattatgtttgaaacatgaaagtctttgtggaagatatttttctgatgttgtcctggaatacctagcatttcaaacagggtttttttggatttcctaattacaccttcttgactagtaactggaataggcagacgctgacatcttgagtggttggatgcattttaattcctgaagcatacattatgatttgcttgtatgatgtttctgttttctttgtaagcatgagtttgcagagaaagatagttacacagttagtttctttagttttcttccacgccaacagagttagcagagacattttattcttatcaggtctctacaatttcactctttgttttggagaaaagatgagcggtttgttgtcctgttttctcatgcctaattatggtgacataacatttagctaagtacactgactctaatgggtgccagataaatgtttacttgctttcaatttgttaatttggctttaagaacccaagagctggtgttggtagaagtgtttgtttactctctcagggaagtaaaagttaatattgggttacagccagtgtgttttacacaactggtttttctccagtgtgtgcgtggggagtatgtgtgtgtatgtatatttatgttcatcgatgccttcaacagtgtaacaaaaaaaccagattcatatcattcttttttctttatagattaaggtaaatgagagctaaaacactagataaaagaaaaaagaaacatattgacttcttcccatgtttcttttttttaatccagtggaagatgcttgtggtcactgaggtatggaatgcgaatgctagtactagattttaagatagacatattctcctatgttccctaatcaaaaatcgagggttgccccagtgattaagattctcagcttttagccaggcgtggttgtagtcccagcagctcgggaggctgagtcaggaggattacttgagtctgggaggtcaagactgcagtgagctgtgattgcatcactgcactccaacctgtctccaaaaaaaaaaaaagaatgattccttcccagcttgactgaatgggaagttaggatgtgcatcctacaggaattgaggggaggagggtggtagtggtttgaactattgttctgtttctgaaacctggaaagggactctggaatccactacaagttgctaaataatttgtggagaactgaaagcaacctccatgatgagctttttatatgatcagaaagactgtcttgcgatactctataaaatctgatgtccatatcccacttccttgccagaaaaaaagagtcatcaataaagaagaaacataattgtagggatacctatttatctgtttattcagttcaaatgaccactggagttggtgctaaatgtgcatttttaacaagtataatatttcagcactgtcaaaattacctctacaataataggcttgttaaattatagctctataagctagggggtaagatggctctgcccagcacacattaatctatgcctgttcacacaagtgattctgctgagcaggtagcatgtttaaacaagaaatactggtcctaaaacctctgatttatggtaggtgttgttttgacacagcaccattcagacaatttacaaggcaaagcttcgtgctaaaatatttcctcagtgtcatcattcgtcaccagtataaatattcagtagtgatgctggaaaattggtaatatgcccattgatgccaaatcactcgctatgtttcctttcaagtgagatctgttgtggatatggttaaaagaaactatgatttttcttccttgagagcagatgagctgtaagaaattgagaataacaaccgtcctgacagctttcatgtactcaatcttgcctatattgcttttaattctggcttaagtcctgcgggctttccctcccacccccttgcctgatgcgtattgtaaagaacacatttatatgtacattagttagtttaagaggctttttgtgttcaaaggaagaagttagtcatcaccagaaaagctttgttgcaaaacaaaaacacacatttcccctttcattttttcttgttaataataacaaatgcaagtgactataaagggaataacacaaaagattgcatcaatcataatgattctcaatagccacataaatattgttttttcagctttgaatgaaacagctaagagtttgaagtaggtgtggtaattaaatcctgtcgggttatcacaaattaaaaataatgtttttttcacataacaatggttatatgtacttaaactcttatcaggggtgatacgaagtcatattttatgggagttgctcctttactgctaatagtatcataaaagcctttgttaggagtttaaatagttacgtagttacatatatttgattgctattgttattttgtcagtaatctgtatgtaagcgattactgtagcacttgtctacagctggtaaatattgcatcattttggcataatttttaatctactagaatgttctgattcatggtttttctccataataaatcatacatggagatactgacaacttagtaacagagaaagcactgtgtttgtccaataaaatgttaaaaagataaaaaactagggaagaatgtgctttgttcaaagtgataatcatgtaatatttcaggaaattataagatgacattttacttaactgtgttaaattgttttcctatagtgtatataatgtgatacctgcatgtatttgtatatgcctgtatctctctctctctgtctctctcgatatatgtaagttctccacttcagtctaatgtccgtggctatggttttaacgcccccccattaactgatttgatatgtgttgtctttatctttatcttcggctaacttggaactagctaacttggaactcagggctttgtagcatatcccaatatctgctgttaatgtgtgcttagtaatttggcattagcctatgggatgtgtgactgataatagtaattcaagtattgtcatttaaaactgtcccccactgttagatcaacattatagttctctgtgaccttattgtcagaaaagaatcaaagtatcttcatgacttagttcttagctgttggataaccatttcaagggaaaatagaacactgtttctggaataacctaatgatattccattagccacttgcagtggccgatttcaacatgaataaatattgataagtatattactgagagcctaatatgtataaagcatagtttttggacactaagtggaagttgttgggatttgctagcttgaaacgctgttctgttttactgtaaggccaactgcttcccctcaaagatttgactttgaagttctcatatgagaactctggttttcatttataattggagttttaatttgagagttttccatttataactggagtttaatttgagttttatatgagaactgattttcacttataattggagttttcttattccattattttattccttccccctttattataaacatgattatttatattgccatgaagacagtggaaaaaaaatcagaatatttacaacgctgaggttgtgacattttgttttccatgaagtttaaaacatttttgcttttatcaagtttttgatagtgtttatgaaaatgatagttacattctaatttaggtaattacgtatttaccacccttgtcttatgttagccttgtttcccccttgtcttccttgccttgttttccccttgtcttcttggagcttatctgttgtttccttgctaaatcccctgagcccaggattggatacactgtatctgattagtaaatatttgttggctggacagaacaagaaatagttccaagagtgcatttgcatctctttaagcaacacccataaagaacaatgggactttacagtgttgaaataaaattagagtgttttttgtcttacagctggtacttatattaaatttaactcttgcttccaattttctttttcaaaagtacagtttgtaatagattactttggtggactttgtttctgatacgtgatggcctgaagagaaaaaccgtacattggttctttggaagctgtgattcatggaactagaccaagttctcctgttgtttaccagtcaaagaaatgaaactgtcaaacacctaataacttttttgggggtttagttgtgtgttgaaggtgacttttaacactctgtgggttaagcgtctggtactgtatagttttgtttcataaacttcatgcccttaagaagtaaagagaggaattaatccatttaaaatcatcagtagacattgaaaatctgttcttgcacagggagttgaggtgttgagatgccccaattctgctaggatcatagtttgtggtaactaagtcggtcacattacttctcttagcctcagggttctaacaggtaaaaagtggctttttcattcatcaagcatttcttggtcttctactcatcgtcagttgtggtcccaaacattgaaacaaaagtacctgttttcaagggacttgcaaacttaaatagttgccgacagtggatgatgatgatgatgatttcttctccttcttctccttctcctccttcttctccttcttctccttctccttctcctcctccttcttctccttctcctcctccttcttctccttctcctcctcctcctccttccttcttcattcttcttccttcttccttctttcctctttgttcttcttcttctttttttttttttttcttgagacagagtcttggtctgttgcctaggctggagtgcagtggtgtgatctcagctcattgcaacctccgccctctgggctcaagcaattctcttgcctcagcctaccgagtagctgggactacaggcatatgccaccacacttggctgattttgtatttttagtagagacagagtttcaccatgttggccagactggtattgaactcctgacctcaagtgatctgccttcagcctcccaaagtgctgggacaggtgtgagccaccacactagaccaacaatggattacttctaaaaaccatcctgtgtcagaatctatgatctcatatcaaaaagatgcatattaaaattaatgcagctgccaaatggaagtctagatacttttctagatacaacacacatgagcatagctccatcagatatgtcttcttcataattcattggccttgattttataaaatttccaaaaatggttcttttggcacttcaaaaccaattgtgttcaaaagaaatcataccagtgggagtagcagaggtgttcaggaaacaaaataaatgattctttatttcagatcataatctctaagcttcaagtggactcacaacaatttctagctagactcttgactgggcctagatgcttttctgagccactgggggaggtctaagtgctacagctcagcttaggaaagtgtgttggagaaaggggagggacttccagtgttgccctttacaagtacctgtacacgctttgggcttttagaagtattgataggagaaagaacataagtaatgatattttccctgtaagtaatgttatcatgaaattcaactatgattcactgagtgttctcattcttggtcaccaggattaatgtttgagaaatttcttcctcgtttaaatagaagctctttcatatctcaaataaagactcgacaagcttcaaagtacattttgaggccctggcagtggggaagggggagggagggggaggaaaaaaacaggacatttttgagaggaagtttattaaaaacaagttctctgttctggaaacattttcctttcatgtcttgtttgcatttgcattttaatagattatatcacataggcaaatgttccagcacctcttgaacacctggaaagcctgtcttagacttgttctggtgtttagaaatctttaggcagacagtgttccaaatacagtcatgctcgccaggcatggtggctcatgtcatataatcccagctacttgggaggctcaggcaggaggatcgcttgaggccaggagtttgaaagcagctcggacaatagcaagaccccatctctaaaaaaaattagctgtgcacagtggtgtgtgcctatagtaccggctcctcgtgagactgaggtgggaggattgcttgagcccaaatgttagaagctgcagtgagctatgattactgtattgcccccccaagcctaggaatcagaatgagaccctgtctctaaaactgtgcagcaacatctgagaaaacagtatatctcccctggttgatcttcagcctgatagtagctaatcagacttctctctgaacttcaggtggaagtttatagaaatgttcttttgcttcagtgactggtctcattcctcactctgattgaagcacataatagaagagttcagagattttgggagttggaggaaaaaatagcatacccagttctttctgtgttccgcacaatgatattggaacagggaatatagttgaagcagatttacccttaaatatattttctccacatacaattccacacgccttgatcagcagcagtgctttgaggcatagttacaatcatggattattttttttcattacctttacatatttaaaagtagagaaggaaggaaatggttgcttttttaaaagtagtcattatttttaatttttttttcctcctgttggtgtcagaatggcctgggcgcataaaatttatttcctttgggggaactataaatgtattcttcttctctttttggagaataaaatggtagtgacatcttacaattatcccatgcgaatataaatcttctctatatactccctattacttagcatgaaaatgaaaagggagtcaagtatagtttaataagttctaccaatgaactgtattgtagacagaagtatttcttattggtgccaagttggaaaagttagtcttgacgtggtcctgtaaatgaaaggaaaatcaacacatacatttcaggatcatgagtgatcagtgtcactagaaaagtgttcttctttcactttaagattaaataaatagttgttgacataaatagccggggtaataaaagggaacacctgtgtaatccagccatcagcagttttatcgtacaatcagataagctgctgtttgttaaggaattgtcaagtctttagaccagatgaatagatttagctcatacgttagagaattttaaaaactgaacagaagaagctttaatttcccttgatgccaaatgttctaaccactctcatctcctttcacacacgagaagctgtaggagtttaaagctcaattgacctagccttcaggtatgtcttcttccattagttattgctgtaccaaagtagctaaatgttctagatgagattagggtttgaaattttatatggcaaaataagtacctcatcatttttggataaacatggggtattttttttctaatacagctcatcttttctctccctttaattctcatgtccactttcatttgatgtcaaatgagagagaactttggttgtcatttaagagcctcttgatcaaaacagttatcttaagaagcattgattgtgtgtgtgtgtgtgtgtgtgtgtgtgtgtgtgtgtgtgtgtgtgtgttgtgatgggtaggggagagggagagagagactttttagttagcttgtcccaccacaataagaattatatttttggattctcttaataatatgtgaaatttaaaatttgaaaattaatcagcaaataagatgtcctttgacttcacccaccagcaaatggaaggatttttctttattttctaataggggatttaaatcactatatgatttgggatccatggtacccttttggtaaaaagcatgactttagaatcagcctgcccaaatgtgaatctcagctcttccttgctgaattacttaaactctttctgcttcaacttatttgtagtatggcgatgatattaacagtacaatcctttttttgtgtgagtgacaattaagagaatcaatatatgaaaagcatttgatatggtacctaacagctaaaaattgatttttttgactaattgagatgatgaaattttagtagtcttaaaaaatgtacaaattccaaatttgctagttttgatgaaacaataggagtctgggaagggtgtctgtgttttcctggatgcaaagaaaaatagataaatgaccaagactaacaagccacaaaagaaaatcaatagagtattttttttgtttgtttgcatgttttctttttggttgtgttttcaatggggcttagcttcattccagagttaattttaaatttaatttggttttacaatgagagctcaattttgcatgtaagtaccaaacatctggtttactttttgtttgaaaacgatacagctgaagttgagtacagaagtctattgtgtaattaaggaaagagagtttgaaattttgtaaaataagttctatttaaatggaatattggaattattccagagaagtggatatacttcttaggagtaggagaaacttacattatttttaaaaaatgctataactagtccaaatgtataaattctatgtattcacctttttcaaaaagcatgaaaaatgacaaatttcacaagtgaaagttaaagttgacctaaggcagttttagattgttgagccttcaaattttattcatgggatgtttttagagacagtctgtggtttgatcactccagttaattctgggcaatctttctacatttctatcagatggacattctgatattttaaaacttcctcttgcgcaaaatatgtttaaagcaacctgggaagaaaatgagatttctggttagttcttgtaaactataaattatgtttttaagacatttaaaggaattataagccaaacatagataactcctgttactgcactattaccattaataaactaacaattaaaatgccgtaaagtactgactggatataatactagcattgtgatatataaaaaatagaatttggggtggagagacctaaatgaagataggacacctactaattttccacctgcttgccagatagttgtgtcttcaggcagagacacccaactagtccagagtcttaggattcaacctcagtaatgtcagaaaggccctcagctctgaactgcgatgattctctcattctgtgcaactcttttagaaataatttgataagagcttaagaaagtcaaaaataggttgtttgtaagacatcagaggatttttataatagttttgccccacccttgaatgttttagaggtctgttgtaggacagaggttttggtttctggcagttgcattctagttctctaccaaattgaggatcagccagaggtacaatacatttggaatcttgccctgtgtcttataattttatagcaacattataaatttatttgacaacttaagcttataaaacttctgtcacttccgttgtcttgtttcatctgcagtagcaacaaagcaacaagaaatctgttgcagtctctctgcctctgagcatccacacagtagatccaccctcttctttgccttcttgcccaatactcttgttattgtccctatcggtttttatgtggcaaccgcagggatgtgatgcctgtaattgaaaattaaatgattgccataaatcattaatcagactgcagattataacagcatttattaagcatcttggtaggccaggagtgtgctgggaattttgcataaggtaaccggttactgtcttgtgaattctgtctgggtattttcctgtgtttgtttcttccaacttttatttttggttcagacggtacatatgcaggtttgttacatgagtagattacatgtggtggagggtttggtatacagattattttgtcacccaggtaatgagcaaagtacctgataggtaattttttgatccttgccctcctcctaccataaagtaggtcccagaatctgttgttgttcccttctttttttttttttttttgagagagtcttgctctgtcactcaggctggagtgcagtggcgcaatcttggctcactgcaacttccgcctctggggtgtaagcaattatcctgcctcagtctcctgagtagttggaattacaagcgcatatcaccatgcccagctggttttgtatttttagtagatgtggggtttcaccatattggctaagctggtcttgaactcctgacctcaggtgatcctcctgccttggcctcccaaagtgctgggattacagccgtgagccactgtgcccggcctgttgtttccttctcagagtccacatgtactaaatgtttagctcctgtttgtaagtgaaaacatgtgatatttggttttctgtttcttgttaatttgcttgggataatggcttccagctccatccatgttgctgcaaagggcataagtttgttcttttctatggctgcgtagtattccatggtgtatatgtaccacattttctttatccaggccaccattgatgggcacctaagttgactccttgtgtttgctattgtgaatagtgctatgataaacatacaagtgcatgtgtctctttttttttttttttttggagatggggtctcctctgttgtccagtgcagtggcaagatctcagctcactgtaacctccacctcccggagtcaagtgattctcccattttagctttccaagtatctgggactacaggcatgtggtacctaatttttttttcttttttttttttttaggtagagatggggttttaccatgttacccagacaggctggttttgaactcctgggctcaagtgatctgcctgcctcagcctcccaaagtgttgtgattacaggcataagtcaccgtgtccagccatgtgtgtctttgtggtagaatgatttattttcctttgggtctatacccagtagtggattgctaggttggatggtagttttcttttaagttctttgagaagtctccagactgcttcccacaatggctgaatttccatttcctccaacagtatatatgtgttccttttctctgcaacctcaccagcatctgttattttttgactttttaataatagctcttctgactggtgtgagatgatatctcattgtggttttgatttgcatttctctgatgtttagtgatgttgagctttttttcatatgcttggtgactgtttttgtcctttgcccattttttttactggagttgtttgttttttgcttgtaaacttaagttccttatagattctgttctttttgcttaggattgctttggctctttggacgctattttttgattccatatgaatttcagtatagtttttctagttctgtgaaaaatggctttggtaggttgataggaagagcattgaatctgtaaattgctctgggcagtatggccattttgacaatattcctatccatgagcatggaatatatttccatttgtttgtgtagtctctgattttttttcagccatgttttctaattcttgatgtagagatcttttacgtctttggttacctgtgttcctaaatattttatgtttttgtggccgtggtattcttgatttggctctcagcttggatgttagtggtgtatagaaatgctactgattttatgcattgatttttgtatcccgtaactttgctgaagttgtttatcagatctgggagctgttgggcagagaatatggggttttccaggtatagaatcatgtcgtctacgaagagaggtagtttgacttgctttttcctatttggttgccttttctttctttttcttgcttgattgttctggctaggacttccagtattgaataggtgtagtgagagtaggcctccttgtcttactggttatcaaggagaatgcttccagcctttgtccctgggcattttctaaagttatgtcgcccattcctatatagtataatattttatgttatcatcatgcttcaccccctcagataagggttaagttacgtttaatatagtacttcctttccaatgaatgtggatatcttattaatcatatgtttaaaaatttgacaaatttgtgtgacctggaaaaatccatcacaaataacaggtgtcacagtgtgtatctaatggatgcgtttatctgtctgaatgtgtatgtgtgtgtgtaatgttgatataagaattccaatttgagttacatgtgtgaaactaagaaatattttaacctctgtcttcttcaccttctgaaatgtttactcagctgttacataaacttgcttttatcaattttcagaaggatttagcatttgaaaatgagttagtcccacaatgggagaaaaaagtttttactatgtagtaaatgttactgcttctgcaaactagatgatcacttttgcctgttatcatgggcatacgttttctagacttctagcagtacattggcatgactttctaaatcaagtttttataattttttaaccggtcatatgttaggagagtgctagctctgaaatttgtagtgtttggtgtcataggagatactgtggaatggtgctaccatagctattccttggcatttgtgtcctactgggagtggaaataattctgtctttggtatgaacattttttccttttttagctctccaaagtgataatggagaactttttatttatattttaataaaaaggagagaaagagggaaaggagacagagaataaactctcaaatccttccaaattagaagtcctgttaactatttcaagatgtctttggtcattctcataaattttagatttaattataaatgtatctagaacatttcatgtaggctattttggaaatgcagttgaacttttaataggactcatcattgttagactttgaatgacagaataacatggtcagaaggggcatctcaggaggttcctgttagaagaaccacagccaagtgcctttcaagcttgtggaaatcccatccagctgttctctaggcctgaaaaaatgtgggaaatcgaaagattggtgaattctcttggtggtctactcagaagaaaccatattagtaatgttgatggttcagtatcaaacctggcttgggctcagagcttgtgagcctagagtcacacatgtaccaatccaggtgagaccccagctgaaaaatttctttgccttgttttatttatatagctaggctttttagtacatggcccactttttagctacttgccctcctccacccataaatcatggtgatgagaaagacagagattcttctatcatccattttattccttgtttcttcttcttattattatatttttttggcagtaatttaagagatttgctttctttcttgtttgctgtagaagtcaaacagtatttggaaatttgcggaaaatagcgtttcataaatcttctaatttagtcttcacaaggcttgatattttatagtgagacactgatttttactcatacccttttcacaagtagtatgatgataagatctaatcctaattctagccatctatttgttctttgttctaaaacttaagtgtgtaccttagatatcactatttcttttttttctggtttactcatgatcttttgttaaatttaaaaatttttttttttatttccataggctattggggagcaggtggtatttggttacatgagtaagttctttagtggtgatttgtgagattttggtgcacccttcacccaagcaggatacactgcaccatatttgtagtcttttatccttcaccccctttccaacctttcccctcaagtccttaaagtccattgtgtcattcttatgcctttgcatccccatagcttagctcctacttatgagttgagaacatacgatgtttggttttccattcttgagttacttcacttataataatagtctccagtctcatccaggtcactgcaaatgccattaattcattcttttttatggctgagtagtattctgtcgtatctatattccacggtttctttatccacttgttgatgggcatttgggttggttccacatttttgcaattgcaaattgtgctgctataaacaggcacatgcaagtatctttttcgcgtaatgacttcctctgagtagatacccagtagtgggattgctggatcaaatggtagttctacttttagttatgtaaggaatctccacactgtcttccttagtggttgtactagtttacattcccaccagcagagatatcactatttctgttgcttcagggaaaaccagtttccagtttcctttatgtattgatggtcctctgaaaaagatagagctggacactgtggtgcacacctgtagtcccagccactcaggagactggttcaggatgatcccttgagcccaggagtttgaggccagcctggtcagcatcgtaagaccccgtctcttacgaaagagtcaatacacacaaataggtttactgaataacacagccattttctgttgagggagcaactggctccttggatgattggattagcttctctttttttggcccaaagtagaataactatggtatttttaccatttcccctcagtctcacttctaaggttcttttcaaaaatgggctaagatatgttaaggtttattaaaaacttcattgataccccccaccccccaccttgtgtaagctgcaacttagtcagagagattacatgtggagctttatatttatggtacattctttgttctctgcttttatactgcacctcagaggattcttaaattctttgacttttgaagcttttcgttttctttgctgagtttgaggacaaattttgggcaaaaacacccggatgataaataatgcatctagacaaaaagagaaacaaagtgaaactcagtgaaaagtaaatcgacctaaacagtctaagaacatttaacgttttgattacatctcatgacatttgatatcttgaccccttcagcctgtgctggctgttgcctttgcctccgacttgtaatgtcagaggattaaagctcttttactcctttctggtgaaaatatttgcaatttcagatttgtaactagtagatctgttcagctgtaaggaaacctttcagtgatgagcaacacgacttttcatctgagggatgcagagtctatgactgcccgagagattgggatcctgtagtggttttatttcattatgagcctccaccagtattatttaatgcaaccaggttttgaatgctggtgagaacacagttaaggtcatggtctgcaaggactttgatgtcgtgcagaagcctgattttcccataataggcatgaaaagcttgtgcaatatagctcttaggagatgaatatttgttcctgtaggttacaatagcagacataacctgtgagtgatggaaaatgtcgggcagaatatggatttggaggaaaaaggggaagaactagtatgaaaaaattagccatagaaatcgatagatactaggccaagaatataactgcaaacgtgtcagctgggttttcccaagaatgattgacagacactattgcagatcctgcaagtaaagaatttctgatgttttctttttttttcctttaaagttcaactaaatgatttccttatagatttgaaactcttttctccttatacagaaatttctcctctcttcttagttcccagatttttgtgctaagagaatgcataaaaggcaattattctgttgatatctttttaactatctgtaaagatatccatattgattcttagggccactaccctggtacagtttttggtggcttgaattaataggatggtttgctgtccattttatttgtgtctggagaaaactttaggttttaatgcacttgcaaattccttgggcaatctgtagcctgtttggctgtctttgttgcctttcctttagatgctatgccgagtccatgaagtgctcttctctctaaggaatacagagactggggatagtccccagagttgaggaaacgtagagccccgtaggtgtaccagttatggtgggtggtgggagtgccctgggctagcgctgaaacttcaggttttcagtggttgacatcatgagtgaggagacttttggaagaagcagaactgaaggtaagactgagtaagtggatctgtccaagagtaaggagagatgaggcctggagatggtcaaggcaacacacagaatctgactttggcagtggatcctagaccagatcagaaccagaactagagatcaggaggtcagcatggaatcagtgggaagccttccatctgcatggttgccagcttcgtgccaagggatgttctggcaattatggaagcacatattggtacaggtttgactaaccacccagacttttagcactggagtttgttgttgcttttttaaattttttcccccaggacagctgtcaatttggggagatatacaggtatgaattgcatgggaaagaaccattgaatatgactctgggatggttaaatatcttgaagctgcaaagaaggaacatagaacaaagaacaagatgaattctcatcttatgatttaaactgcatttaaacaatgtccgtagatcctgccttcctggaggtagaggccaagtagcaccatatacatatgcgtgctatttctgagcactcacggccccattgggcatgggctgtgtaggtgccaaggctggaggggctcctggggctgtgggtgttttgctcaccccctacacagcttgccctcatgcttctctgtaacagggtcaagtttctgggttacagctgccacaggaacaagctggcacattcttcttgttttgaatttgaccactgggtatttatttattttcccacctttgattgacatcaacgtttggtgacctccttcatccctcctttgggcggccaatcctgcccagccacaacactggtctcagttctcataatgatgttcccatcatgtctcttttgtaaacagagcaaatacagaaaatgccagtttctaaactttcacttaatttctacccatccactcagaaatacccactgagtcttatcttgagttaggcactgtgtttggagctaggccaagaggtcgtcaaaattgtggggaagatggatgcgcagtaagcagcagagggctgggcttgggattggctccgtggaaggagaggcccaggggccacgggagtacaggagacaagccaaccagatttgaggtggggcgagccttgaaggatctctcacggacctgtcatggggatgggtggttggggttacagcagccctggaggtaagggaaaggagctgcccagctggcgtggagtgattgcaggccaggtggtgtgagggcctgcccaggccaggttgggccatgcagggcagataaaggattttaaactttatccctagagcaggaaggctttgtcttcagtaaaatggatgcctgataacgtcacctttcggtgcttgccggagctccatttcatcagggaacctattaagagtaaaaatagggactcatttggatttttaaacttttttttttagaatcaggatctcacgatttttcccaggctggtcttgaactcctggcctcaggtgatcctactgcctgggcctcataaagtgctgagattccaggcatgagccatcgtgcctggcctgtttgtttgttttaaacatgaacttattttaatgtgtcacaaattttgtaactatctgacacttagttcacatttcaccatattgtttgtggccattttgattctttgattttcatttaattgcattgagtataatagcagcaaagtctatcttcttactgtttgttcctgttccaagcacctcccaaagaggagtaaaccaacatattttattatctctgtaatccagaaaattattgcataaggacatgtacacatttagtttggaactccagggcaaattagtatatttcctgggtttattttcttataaataatgaccaatatttcataaatattcatttaccactggtcatttaaaaagtggaattgcagtaaagttttaattggtaaagtgtaacgtgcttgtgtgtggaaaggcagcaacagacttggagacttgagcttctaaaagtttcattagtactctaagggctttatcttagggaaagaattggtcctttttctgtaaaaataaaaatgctgttcagtattggttccccccgccccaccgcccactttccccaaagaaaataaaactttgctgcttaatcagggttccagatgtctgtatgtatttatttattcagatatttatagtgttctctgtcaaacagtttgcctccctgggtgcattccagcaatgttaaaaacatacatggcaaagccacagagatcaaagacctgtgtcttgtgaaccctttgcaacatttgggccagtctctaaaatgatttatattaaaacaaccaaataagcactcttcctgtccacatcgtgctttaaggagtgttctggatggggcctgaagaacccgtgcaaattggagttcccccccatctttcgaatgagggacaccaccaggaaagcttcctgtggggctgcatttgacccgcaggtgcctctcccatttcctgtatttccacattttatttttgttttcattatttcttcctttaaaatatgggagttaacgattttacccccccttaaatattctaccatgtagaattttagactgtccattaaaaatatgggtttcattttctatattattttcaaaatatgcagtatctaccatctaaatgggaaacagcaagacttttttgtagtgacaaattaatgccactgtgactaatatctctgaaagggaagtgcctgtagcagctgaggcctgtgagctggagcaggacaaagcatagatgttgtgctctgagtaagaaagtctcaatacacgtggccttcctggtgagagctcttacttgagtgttttaaagaccagtgatctggcttagtccatcattggaaagtgttatgaaagcggccaatagacattttcctacttccactgcttgttgcagatcttctcttctggctgggagctggggtggatccggtaggggacagagcagataggtgtgtgaagtgacaaccttgaaaagaacctggccctatctacctttatgcctaccatctgtgatttgccagagttctctgcagagcaaaccatgtaaagtaaaatgttgcataaacctgctactctatccctggcccaactctgggtgtcaagaagtatgctgtgctttctgcacgaatgtgatgaatgtgggaacctttttgagatagcagcacatgctggcagtggcgagccgtgtgcgcctgggcaggctgggcgttcggcaggcatgttcccaggcacttcctagggacttgttgcatcatcaggtgtttgattctccaccccgtccttccccagcgtgtccaccacccttaggtgagagagtagaaaggagttccactcaaactaggagaattgatgtgtggctgtggaatttcctgtctttccgagttagcatgctatttgtagaggaaccttttggcttccatttgagactggatctcctttgtggaattcatccgtaactttaagagtataacttaggctcctgtcactactagttcatgctgggaataccctcagaaaggctactgtcagtccaaaccaaagttacccagatgcttctctttcttttttcaaagttgagatctggccgggtacggtggctcacgcctgtaatcttagcactttgggaggccaaggtgggtggatcacttgaggtcaggagtttgagaccagcctgggtaacatagtgagacactgtctcttcaaaaagtacaaaaattacccaggcgtggtggtgcatgcctgtagtcccagctacttgggaggctaagcccagaagacggaggttgcagtgagccgagattgcaccactatactcactttttgagacgggagtgaaaacccccgtctcaaaacactaaataaataaaataaaaataaatttgagatctttccccacaatgaaagccttgctgtcccttaaatattaataacattaattactgttctacttaattttatattaaattatatccaaaaaatcatgatttgctaacatttttaaaaactgtgttttaattttgctagatgtagtttaaaacctagattgaaatttaactagagattgaaactggaattctttcagtcctaatgactagctgtggtgtatttttaaaataatatttctatagtttatgagataagtaatagtttcatgttgctatttacaaacatatctcctacaattacatacagtaggtagtttttatgcctaatgatttaaattacataagtgaaaagtcaaactgagaatatttgtcaaaatattttctcttattaatatgggtgtttagaatgtgagcaacatctttaatataggaattatgggccaggtgcagtggcttatgcctataatcccagcacttctggaggcagagacaggtggatcgcttgagctcaggaattcaagaccagcttggtcaacatggcaagaccctgtctctacaaaaaaatacaaaaattagctgggcatgatggtatgtgcttgtagtcccagctacttgggaggctgaggtgggaggatcacttgagcccgagaggtcaaggctacagtgagctgtgattgcacagctatactccagcctggccaacagagcaagaccctctcaaaaaaaaaaaaaaaagaattatggacattattatattttacctgatcgtgaaatgtagagtgttcactgaaaactttagtttcacggaaaactttagttgagtttgcaaaattacaatttttatgcctctgtaactttttctgattttgatatcattattcacttttacgagtctaaattaaatatgagcaaaactagaaaccatttaaaatggtgggattctcaagctcgtgctggtgtctcttgcagatagctaaatggtagatgaaatagtgaatgaattgtgagtctctgatttggtctctcctacccaccatcaaggcttatccagagattttcaaatagcttttgcgtaagggagacaataattaagctaattattttccttactgccttatgaaaatataaattaaaacagatgtcacttgctgtcttccatggcatgaacctctgtggacaggagactctacactagactagtaatttagggtctgtttttccccccaagttcagacttaatcagatcagttgcagataccctgaaagtgaggccccaagctcctgggtgtcatcgctgcttggtgatcctctgggcatttggtactgccctcttgcactcctcttcccacctcccaggacccccacttcccctgagcatcatttccttctctatggctcttgtccttatttatttatttatttaaatttttttgagacagagtcttgctctgtcacccaggctggagtgcagtggtgtgatcttggctcactgcaacctccgcctcttgggttcaagtgattctcctgcctcagcctcccaagtagctgggattacaggtgtgtgccacctcctccggctagcttttgtatttttgtagagatagagttttgccctgttgtccaggctgatctcgaactcctgagctcaactgatctgcctacctcggcctctcttgttttcatttaaatggctcctgggatcacatttccttcactacatattcttagaacacttttctagaatagtctgcagcattttccttctttaaactcaagactcgcccttctccacttcccttgatcccgttatgtatttatctttacttttcattgctagaaacacatcccctggaagtatagagaatgtttgtacgtcactgtcttcttccatttagatcctctatcctctctttttaaaaaataacatatatattttttggcatttccccctcctccttttggccttcggttctcagtgtatacaagctcacagagggctaggatggttactgcctctgaatgaccattattcatgcatctgagcattggtaactgacctaggaacaatcagcttctgatgggctcctcttgaaattgtagcgcatggaaggctttagtgaatatcattgtgttgacttagccatgtcacccagtggggtggcatttcattcatattcatcatttacatcttaacctgaacgtgtttggcttgggcaggaaagtggggatcaagaatattgattgtgtaaaatatttttcagaaaggtcaattgctatggcgttttctaagggtcacccaatgctttgcagagtaaaatgcttacccacatcctcttcattctccttttcttctctgcataaggtggctcttgtgtcccttcagcacccttctctgccaccacaggcaggctcttcctttgccattcctcccctcagatgtcgctgttgttgttcttcgctttgctctccttatcctacaaggagagttctcctttgttggaggtgggaggggactctggtctccagaagtgctgttactgtctcatctctctcaccagttggtgacagaggggctaccacagcaggtacctcctctgtgacccaggcaaattgggtgctgagtgtccacgtcgagctgaatgctctgatggtgtctccaggaatggatgcatgtgatggatagactggatgctgagagaaggatggctggaaagtttttttaaaaaaatgtttttagggactgggtgtggtggctcatacctgtaatcccacctttttgggaggtcagggcaggcagatcaattgaggccaggagtttgagaccagcctggccaacatggtgaaaccccatctatactgaaaatacaaaaattagccaggtgtggtggtgcacgcctgtaatcccagctactcgggaggccgaggtgggagaattgcttgaacccaggaggcggaggttgcagtgagccgagactgtgcccctgcactccagcctgggtgacagagcaagattctgtctccaaaaaaaaaaaaaaaaaaaaaagttttaaaatcatagtaaaatgcacctaacgtaagatttgccatgttaatcattttaagtactctatatagtttggtgacgttaagtacatttgcattattgtgcagctgtcaccatcctccatctcctgaacttatccatcttcccaaactgaaacccaggacccattaaacactaactccccaccaccccttctctccaccccctggcattcacccttctactttctgtctctgagtttgactgttctacatgctggacataactggaatcaaacagtctttttccttttctgagaggcttattttatttcgtgtaatgtccttatggttcatctatgttgtagaatggcccagaatctccttccatcttaaagctgaataatattgcatggtgtgtatatacagtcagccagcctctgtatctgtgggtgctcagattcaaccaactgagaatggaaaatatttggaaaaacaatccaataaaaaattataataccacaacaaaaaaataatgtattacaaatacatagcacttacattgtatttaggcattataagtaatctagggatgatttaaaattaaatgggagggccaggcgcggtggcttacacttgtaatcccagcatttcgggaggctgaggtgggtggatcaacttgaggccaggagttcgagaccagcctgaccaacatggtgaaaccctgtctctactaaaaatacaaaaattagccgggcttggcagtgcatgcctataattccagctactcgagaggctgaggcaggagaatcacttgaacccaggaggcggaagttgcagtgagccgagatcacgccactacactccagtcttggcgacacagtgagactctgtctcaaaaagtaaacaaataaaaaataaaattatattggaggatgtctgtatgttatatgcaaatggacttgagcatttgcagatattggtattggtgggaggtcctggaaccaatcccacacagatagagagggacaaccaactgtaccatctttcgtttatccattcatttgttattgatgtcttgggttgcttctgcgctttgactattgtgcatagtgctgctgtgaacatgagtgtgcgcatatctcttttagacccccgtagtctcttctgttgtgtatatatgtagaggtggaattgctggatcatgcggtaattgtgtgtttcataatttggggacctgtcatattttttttttcattgcacctggaccatttttatgatcccccaactatatacaagaattctaattccttcacatccctgccaacacttggtattttctggttttatgatagtagccatgctcctgggtgtaaggtagtgacttcctttattttcttaaatcaatgaatcctacaaggcagctttgagttgttaattgtggggagtgccaggtcgcctgacatctttgggcaactctttttcttttctcttctttttttttgagacagtcttgctctgttgcccaggcaggagtgcagtggtgcgatctcggctcactgtagcctccgcctctggggttcaggcaattcttctgcctcagcctcccgaatagctgggattatagtcgtgcaccaccaagcccagctaattttttatatttttagtagagacggggtttcaccatgttggccaggctgctctcaaattcctgacgtcaggtgatctgcccacctcagcctccaaaagtgttaggattacaggcgtgagccactgcgcctggctgggcaactcttccctgaaaacaaggcgcccatgtgatggagcctgtgcgggtttttgttgtgcgtcccctcttgtcgcctttccttggcatgcttcccctttttttaatcctacacttgaaaattagatcaaacacaaactgtgtttagatttatttacagtttcttaactcctttcctgtttgccttttgacaggcttggcataagaagtctttttcaagtagtaaattaatttaggtggcacgcaccccacctgagttttgttacatgctggcagtttagataaatggatattataatctcagcacatttctgcccaacaccactgcacagatttgcaagagtctacaaaagtgataatattctgtcagtttggagcctagaaaaagaagaagaaggagaaaaaaaagcattttcttgttcgtatttctaggatgcctgtggggaagccggaaatgccatatagcagtttacatggctaaatacacatgaaaaaagataagggacccaaagatgtttctttgtaggcacacgggagaagagtcagttcaaattggtaattgtcagctgtgtttggagatacattctccatcgcaaccaaagatttttctttttcccccttaaactcaccatttccttgaagaatgcagtctatttttaatgactttattgatttgacgattgggttacaatgtactttatttactgcagaaatgtttcgttcctgtcagcacttaatgcgaataaatctactttttggcaccactttgatagactgtaaaactgcttatatttgcaggaaaatttgttttgccacggtatgtttatgtcagactcagtgtgactttttctcccctcaaaatcattttatatcatagtgtagctgacaaataaatacacacagtgcagtaatcattgtgtactgtcagagcagcagaaaacaaaatgtgggttttatgacagggatcaaaaaagagatttaatattcacaattaaagccacttatttaatgctttctgtttttgcttctgtattaaggctttccagtttttggttcatagtttgtatatctcttaaaaatagtaaatatacagtaaaccctacattcactgatattgtctgcatgtgaatttaatatttattatccaagaagacccaataaaagtcgatctttatttcctattgttcaaggtataagcaaagtcaaaatacatttgcaatacgataagttttctgttaagtttctttcttttcttttttttttttttttaagatggagttttgctcttgttgcccaggctggagtgcaatggtgtgatctcggctcactgcaacctccactccccaggttcaagcgattcttctgcctcagcctcccaagtagctgggattattggcgtgtgccactgcactcaaataagttttgtatttttagtggagagagggtttcaccacgttggccaggctggtctccaactcctgacctcaggtgatccacccgccttggcctcgcaaagtgctggaattacaggtgtgagccactgcgcctggcctgttttctgttaagattcttaagtttttcttgaaagcaatgtcatgtaatatatagctttgctctattataataaatttaatttgggaaggaagctgaatcatctttaaaaattttttttcatgaaacatttttcttctacaaatgttttctagtacgtattttttcttaaataagagaaatactatccattttagttatattatacatttttgttttacttatttttcataggatagcaggatataatattggcaaattgaatatcatcaaatagcctacaaccttagtcctgaatcagtactatgccacaagagaatttggaatatccacaacatgtccattatatttgcagtccatctgaaaaaataatacacaaagaccaacaaatggataacttcctgtacaaatgaacacatcagaaatatcattatgtttattgctttagctacctttatgctttaatatgattggcaattatccagtaaacttgtgccaggtaaaaataagcacccatctgggttattcaatttcaatgaacatgtaaaataatattttaataattacgcaatatttgtttttttaaatttacttttgaatgcatttaacaaactggctaggagtcctttaaagagaggtaaatgcaatcgtcaacagcatctgcaagctaaccccaaagaacccattttcagccaacttcgtgatctctcattcagattcaaatctacaatgaagtgccaaaatcatgcttttaaaaaatgacagcattagtgaaactttggaggtgcttatattgctagtgtaggcaaaaacgcacagcaatacagagctaggccgttttccttgattctttcaccataggaagaaatgaacttccagggaggtaatggagtccttctgagaaccatgattaaaagtctttgggaattatcagccaaacttaaaatggatctctaggttttcatggggagttgtgttaaaaagggactttttaatttaaaggaaccaagttgataaggtaggttcagggaaccaaaaatgttgaacagatttttgctggattgacaacttgtacggatggtgggtttttagggtggttaatcgtctgcgtctagggaaatggccacagcttgcctctccttcggggtgaaaggtaggttctgagtctgtgatttttccctgctcagagtgaataaatattgtaagtaggtgtggtcagctgtccagctctttactttttcagttgggaaggaaagagttgcacagctatgatgttcagagccaacaaggacttgcagacgccctgtgcataggagcagctgaacacattcagaatcatgtaattgagcaggctgctaagtaatggagaaaagaatatcatgcacagagatttgatgtctttttatgggagaacaaaagagtttcgattctttcacattgagtttagcctagccattgtgtggcacaggaggtttaatgaatcattgtttaactaggatcctgccaagtatttgaccattaaatagactccaatgtgtatagagttcttctctgacagactcttatttgactgtgattaattggcatcgaattgttatttaattacctccacagaaatctaagaacagtgtgtattctgattaagttatttgatgtaggaacaggcatggggctggagaggtcagctcagccctcaggactccctgctactaccaaggccaacttctgtggctgcccaaagctcacagaagatccctgaggatcaaaaattcagacagaatctggattttacctttttcttagaatataaaaaatgttttggcaactcatagcataaatttgtaaagctttttttttgcatgttgaaatcctttgaagttatttattggactgtgttaaacatgttcagtgacagttattgaggtttccttcagttcacaattgaaacatgttacgcattcccatacatggagaagaggtcagccagcaggatgcatggcacagtaggagtaaggcagaagaaagtcaatgattgcacagtctggtttgggagtcactatccttagagaatggcaccacaagggcatgagatcaccactgaggggatagagttctgagaggtggagcctctagatgcaaggggagaccacctgtgcttagcagatgggcagggtagcaggagtggaaagaggcagatattaaaagaaagaaaatcaggccaggcacggtggctcacacctgtaatcccagcactttgggaggccaaagcgggtggatcacttgaggccaggagttcgagaccagcctggccaacatggagaaacctcgtctctaaaaatacaaaaattagctgggcatggtggcacacacctgccagctacttgagaggctgaggcaggagaatcgcttgaacccaggaggcggaggttgcagtgagccaagatcgggctactgcactccagcctgggcaacagagagagactctgtctcaaaaaataaaataaaataaatttatatccctgaagccagcatacataaatatctcgaaaagacgatgatgaacagcatcagatgctgcaggaaaagtcaagagcaatgaggatgagggaaaagctggctgctgcgtttagaaatgactggtgaacgccatggtgtgaagaggagcaggaatgggactgcagagggttgtggggcgtttggataggtgaacattccccctaagatgaagatgatggtttgactaagaggtaatgtgtatcttaaactgtttataactgacagcttaggtagaattataagaatcatagtaatatttctagttcttaaaattttatctgaatttttaaagaagaaattcaatggttaaatttcccccctagctttttaatggtgtacttaaatatatatatatatttggtgtacttaaatatatataaatatatatatttggtgtacttaaatatatataaatatatatggtgtacttaaatatatataaatatatatatttggtgtacttaaatatatatatattttggaatatatatatatatatatatatatatatatatattccaaaaaaagttcatgcatttttattgaacacaacctagcacacagtttggtgtaacacctgttggcggttcccagatattaaaatgatgcgccggggatggaactgacgatcacatttgggtgttggttgatctgtttccagcacacctttggttgctttacatagggtgggtagtgggagggcccattgtcttcaagttcagtcacgttctcacactgaatgttttgctgtcctatttttgagtattacatatacttgtatgtggattagagatagagccgattttgcacactgactggtaatttccattcaaggtaatctcagtgattgaatttgatagttgcctttgtggaagtggaaattccttgtctaggtgaatgctgtataaatatgcgttgctgccaccatctctgtgggaacacattcttgtagaccgcttggtatgtctaggcccttgtttttacccctccaatagtcattcttttggagatattccatgagcatttagccgcaaacgacagtgacaggatactggagcagtaaaaactatgtcttagggattaaagtggtacattcccagaagaggtcaagagattggtgatttcttactctcttagaatcagaggttcttaatgagagctctgctgtcctgtggttcctggtttaggaatcccctgaaatcatatgcaaactgtacacatgtgcatttccaagcgaaaacactctgtggcattcattggccatgcagtgtttgagagcagtcgtcctagagattctacctgttgctgtccagggatctgtaccttctggatgctacgtgaggctgggccaggttcactcctccctggtgtattcttgagatccatgggtaaaggaaatggcctggtctgtcttcctaacttttttctttttagcaaatgtaaaataatcatcacttgctgtagcaaagcatgcatagctgctatagcaaaatggtttcccgaggcaatttatcaggtgttttcaatggcttcaaggataatcccctacaatacttcctggcaatgagtgattcggctttgccctgggtcacacagcatgttaaggtctgggatgaggtagaactggagcccctggactttcctaattaattctgccttttattaggctgcatgtcctcattcattcattcattcattcattcatttatttacttgttacaagttatggcctcctgtaacttgcgtaatttaatcctgaggtggagttattttaaatgttttactttaattatgattagccaagagagagttcctgaaacccttctaagcaggagtgatagccaaagtatttaccatccagtacagcaggcagtagcctatcagaagaggcctgggctgtcagcggctgctttggccatcgtcatttgtgtcagccctgcctggaaatttattggctaatttttattagtagacatttaatagaacttgcaaatgtgtccagtaaagtagcttgatgtcatggaggtgttgacatgagcacacctttctgaacctccaggagctgggtatgagtcacagcctggatgcctgacagccaggcatcctggaattaatttcttactgtctctgagcctccactgtatcttctgtaaaatgggaacagtatctgtgtcatagttttgaggtgctgtatgtggtttctggcactaatttagtgctctgtggggtggtcttcaaacacagtgttgagttcactcttctaggtttgtgtgcctcatttggtgccttaagaaaatggtctgggttaggatgtacctttatattattattatttttttattttattttattttttttttgagatcaagtctcactctgtcacccagcctggagtacagtggtgtgatttcggctcactgcagcttccgcctcccaggttcaggcaattctgcctcagcctcacgagtagccgggactacaggcacacaccaccatgtctggctttttttttttttttttttttcgtttttagtagagacagggtttcaccatgttggccaggtgggtctcgaattcctggcctcaggtgatccccccacctctgcctcccaaagtgctggaattacaggcatgagccactgtgcccagcctttttttttttttttttttttttaagaaagggggcatttcttgctcccttgcccagtctggagtgcattagcgtgatcatagctcactgcatcatcaaactcctgggctcaaacagtcctctccccttggtttctccaagtgctgggattgcaggcttgagccaccatgcctggcagcagtgggatgacatctccaatcatgagtgaatgaaccaagatgaccctcaggaaaaaatcttgtccagttgcctgctctcagtgaggaaggcaccgggatgagttagtgtgggctctgtctgtgcacacacaggcagaagccgagtcaatctcttggctatcttctgtggactactttctccagccaaagtcaaatgtgtaaaacgtccatctctccaaactgcacttgtgcccctcctaaatgcttcctctttacaaatatggctttgaagagccataagtacaaggaatttttagcagaggccctcaacacctgatccttttccactcccattccacacccaagtcctctcctatcagcacaccttaggtcatgctcttcccatcaactaggcaaatatttgtcatcccgtcaccctttcctgcctctcagtcctgatggatgtcattccttccacctgatcaaagtccacattcttcatcaatacattctcttccctctttccaaattctcaggccctgttcccatgagggctgaccccgcctcaccctggtaacccgcaccagctggtgatgcccccctgctgttgtgccttcctcattgccgcctgccttgggcatggtccgtgctttcttatttctgccacctgcgtgtgtgctcatgtcgggttgtgtcactctacatgctgtgctcacttacatgtatctattaacctgctaccagtgtgatcataagacactcagagagggctgggtgtggtggctcatgcctgtaatcccagcactttggaggctgaggtgggcaggtcacctgaggtcaggagtttgagaccagcccagccaacatggtgaaaccccgtctctactaaaaatacaaaaatttgctgggtgtggcggtgcacgtctgtattcccagctacttgagaggctgagcgggagaattgcttggatctgggaagtggaggttgcggtgagccgagatcgtgctagtgtgcttcagcctgggcaacagagtgagacttcgtcccccgcaaaaaaacaaaaaacactccagagcgacatcaaacaagcatcaattttaagtcatgaaacaagtaaaattttaattccaattagcaggttctgatgagtgattataggtgtcttacctgatgggtgagcagcaggaaaggaatgagtccaaagtaggagattattgttacccagaggaaggaaaacttgaagctggatgtggaaaacagatgatgaggttgccttttgccttgaagccatttgggtttttataagtcacttagtgtagacagtctcacctagcatcttccagttggggaaaaaaatgagaaggatctgattagaaaatggaagaacacatacatacttttgaaactcattttctccaatttgtcatgtcatgtaataaaacctggaaattactttttcaaaaatatgtcataattatatgaaaaggcaagaaacaactacactttgaaaacacaacacagtcctgggactacaggcatgtgcctccatgcccggctaagttttgtatttttggtagagtcggggttagcttccctagctgcggagggtttctgagaaaagcagcacagttatccgtagccggtccagtataaaggcactcgcattagtggcaggttcctgagagctacatttgtcagcaagagtttcatggaggagaaagggcgaaggctgagatcctggtaggtggaggcaagcagggactgaggaccttcatgacaggtggatggaagagagggaaggccccctgatgggaacagggacacacggccaggaggaatggaggggaggttaggaagagacctctcttctacctcttctttcctcactgtttctaaaaacttaatagctttgatttgacagatgaataaataaggatgtaaatgaggttattttaaatgaaaagtaaagacatgctggtaattatgtaaaataaagataagtcaaaaattacttacaagttttcatgctgtatgtttaggcatagatctaaggtagggtttgagaagttaggcgtgggttgttgtgggtcaatttcaaaggattctgtttagtttatttagatacgcgtaagatgttttgtaggataactgagtgtctgagtaagccctgggctgggagatcaggagtacagataagatttgggatgtataagcaaacaggaaatctttgaaatgaaagtgagcaaagttcgagaagagaatcagaaaaaggaaaaaatggtcaacagatttatccttagaaaaaaataagatgaagcaaaggatattgaaggaagttgccctgaagagtggggtttctcattcctcttctctctgccttatggaaatcccagaatggcttggcagagagttcccaccgcattagaaaacactgcatcaccttgagcaagattggcttttgtcttcacatctctaacatgaggagtttggtctacaaagtgctgtgaacatttctgttgcctgcagaaacctttcttcagaggcaatctctatgtgaaggtcccaatggatgtaaggccctatgtttgagaggggaagggcagagaagggaggagatgaggtgtctggggttgggtgtgcttggcctcctcttcatcctctgtctcattctttaagattcttcaaggcagtctcagaatcttcataagacaaggtttgaggctgggcgctgtgactcatgcctgtattcccagcactttgggaggcagaggtgagcagattgcttgagcctcaagagtttgagaccaacctgggcaacatggcaaaacctcatctctacaaaaaaatttaaaaattagccaggcatggtggtgcaccagaggtcccagctacttgggaggctgaggcaggaggatcagttgagcccagggaggtcaaggctccagtgagccttgacctgggcaacagagtgagaccttttctcaaaaaaaaaaaaacaaaaaaaaaccccataaagtttgaatgttatcagccctggggatccttcgcacccatttaagctctataatcctacaataataatacaaagaatgtctcacccatgtgagctactctagaatttagaagatcccttcataatcatgatctctttgatcctcatgatctttggccctgtgaagtagtccaggcaaatatcatcagctccattttataggtcaggaatttgagtgtcagtataggttgggtgagttgccctgtattgttgagtcctgttgctactgagcctccgaggaggataagtacctcatgtcttgtccctgcctcattttctctttcatgccttctgtgagcctctgccatgttgatggcctgttctgatgagatatactgaaatactggacttctagatctcctgtttggttctcattttggtctaagctgagtgatacaggatgtccaggctggcccatcccctcaaatggcttcctcccctcccagatcacagtgtcatagatgctgtcatccttttcagcccagcaactgtctccaggctccacccaacagcctgtactctggaccagtctgtgccccgccatgtggcaccacattgtacctggagtgcacaggtcaattctctcgacaccatttgatagactctgctctttgggacagactgcttgcatttacattctacttctcacatctcaagatagtggttcccccatcctacctttgccctttgcacactccacctaccatcaactatgggtacctgagggtccaccctctctctgtacttctggcttccaattctctgcaggaatatctaaggccaattctttttttttttttttttttttgacggagtctcgttctgtcgcccagcctggagtgcagtagcatccatcatcttggctcacggcaacctccgcctcccaagctcaagcaattctctgcctcagcttcccatgtacctgggattaaaggcgcccaccaccacgcccacctaagtattttgtagttttagtagagacagggtttcaccatcttggccaggccggtcttgaactcctgacctcgtgacccacctgcctcagcctcccaaagtgctgggattataggcatgagccaccgcgcctggctcaaaggccaattcttatcaaaagtattagttttcagaaccatcagtgaagctataagtgtggatacctataaagaagtttacaaaattgaagagttcactaaacacatctacttttaccttcaaggtcagatgtggcatgacctaatggggtctttcttgttgatacctaagaccatttttgtggtacagaatgggcttaccaggaaggaatgagtggcacatgctacatcatgggtgaacctcaaaatcttgagatacgggaaggaagccagacacaagagatcacatattgtgtgattccttttccatgaaagatactgaaaaagcaaagaggcagaaagtagttgcttgaggctggggtgggcatagggaggcactgtgagtgccatgagggatcttagtgggggcataaaaatgtcttgaaacttatttttggtaatgactgcatcactcagtaaagttactaaaattcattgaattggatacctgaaatggatgagttttatgagacgtaaaatatgtatcaatgcaaatatgcctcaatattttcatatttaagtgtacttttttgttacaaaaaagaatggggctcacagtagacatgggaacttacaagttttaaattgtagtacggttataagggaattgggaagtcttcgtcatgggagacgtatcagaattccggaggtgactttaacttcagattagattctagaatcagtttgtaaaatagagtcatttatgaatttgtattttgacaaaaagttcattaacaccttttataatattctatgttgtggaaaaaagttaggagcaacctgactctgtatgtgatattatgacttcaaaggagcttggtttctctctctctctctctcagaggaaaattttagtgtgctcataacttaatatagacccttttcagacatttcggttgtttcctgcttctgatttaccaaataatgccacattgaccatctttgatgcacttattaatgccttgagatacttcttataaaattgaattttggggtccgtggggatgcactcaatagttgtttattgtccagctcccaaaaatctacctgtgccatcatgcaggattggagtgatgtggatttacattaaatgtgagtccaaaatgtggtctggctcaaagaatttactgtgattgtgggcttagtcatgggatatatcctgaccctgagatatgcagataatacctagggtatttattttaatcctggctaccaggcattcagagaggctggctacctgactatgtgctgaggcaatggccaacatgggaccctgtgtgttatgagagataattgaggtacccaagggataggtgcctgtgagaagtctggaaaacttgtgattaactttcttcaagtagttgaagagctgccctgtcaagagaaattcgattcactttgtatggttgtaagggcagaatcagcagcaacgattggatgttcccggaaggcaagattcggtttaatgtaagcaagccttgtctaacagaacagtccgaaaatagattgggtctcctcaggaaacagtgactcctcttctctcgacatccctggagatgctccagcaggggccagatgtcatttggatgaagaggtgtggcatgtgcatggagggaatttatcataagtgtttgatttggagacctctgggaaaatgactgtgagactgtgaacttgacatcacagctctgattatgacagtttactgcgaagccagatgaaaatattctggccgggtgctatggctcacacctgtaatcccagcactttgggaggctgaggtgggtggatcacctgaggtcagaagcttgagaccagcctgaccaacgtggtgaaaccccgtctctactaaaaatacagaaattagctggtcatggtggcatgtgcctgtaatctcagctacgcgggaggctgaggcaggagaatcacttgaacccaggagacagaggttgcagtgagctgagatctcctccagcctgggcaacagagtgagactccatctcaaaaaaaaaaaaaattaaaacttttattctttttgcaaacaccagtctttgaattgtttcttagaacaaggaagtaactattgaaccttctaatcttatactttctacactgagatcattgttgataagagttttgatttcagctgatctttgacattcagttcagttattggcgtagctgtgtgaggaggtgggctttctcagttgtttttgttttccttgtattttatgctgttttccaaccatgggtctttcagattttaagatgctcccaaatggtcaagataaagggttggttttcacatactaatgatttatgtagcctttttatctttttttcttcttttcttttttgtagagatgaggtctcgctatgttgctcaggctggtcttgaactcttgagctcaagcaatgctcccacctctgccttcagaagtactgggattataggtgtgagccccatacctggcctatcttttttttttttttaatttgaatattgctttcaactttttaaaagctgaaccatacttgcaatgtttctgaatattgcctatgttaacttttccacttaagaaataattcatattttaataattatgtcttaaattttttaacttatattttccttttattggtattgatacactgagatgagaaaaaataacaagaaggacgacaaacaaaatccataagtatctgtcggaaaaatactcatttaattttaatgtttcttaagtatagctgataaaataatagcctgacctcttgccctgcatagcatggtctggcaaacagcagaagggcccccggaagctggttggaaattcaggctccagctcctccccagggccactgcatcaggacctgcatttgaaaagttgagcttcctccccggtggcatgctgcagaacctgtgggtcatagtcatcatcgcacctttttggttttggttttctagcagccatgaaaaagtacctggcgttgtgcctgggcttttttttttttttttaacaggcatgagcccgtttaatccctaggacaaccctctagaggaggtgttattagaggctcagaaaagttgtcactgggcctgccaaaggtgtcactgaatgatgctttctggagtctgtgtgtccgaagcctgagacaagaaaattgaggtgcagctccaacttgtacacactgtgcttcttggccagctggatgcctcaggagaactgcagaggctgcattagccccagcagcgggaggcagctccgtctacagcctctgaccattcatggtccacttgcagcctggtataaaggccccaggacgaagtcaatcctgacaaaccctaggaggccacacatctcatctgtaagcagggcttccggaagcgttgattagaaaagaagttcagaggcctagacacacacacttctcaggggtcacctgcatccacgtaggctatgtgtgtatagcttccatttttttgaaggaaatcatttgaaagaatagatatttattagaaaccaggtttgatctgtttgtgatgcctttatgacatactgttttcttggattctacttgacgggaaataaagtcgatgctaagcagtgatcttcagtcattaaataatatttctgttttcctgcataatttcctcttgtgttcttagataagactaagcctgtttttgtcatactgtttgcacatctgaaaatgacaacttgtttgccagtagtaaactcacagcctggaaaatgataggatcccaagtttccccaaaaatgtgaggtacagtcaagcaggctggggaaaaaaaaatacagaggttatcattatgtttatataaaaaatataccacttagcaaaagaaattctgataaagcaaaattagtgaaataattaggatcaatttctgtacgttcatctacctactttgcacttggatggaagtcctagattgggtcttaaaaggagggaacattctagaacccaccaacccttcctgatactgtcacaagatttttttcccttaattcttttaaaatcagggccacatttcaactccctgcccgctgccatttgatgatatttttgtttctctttaggtatcgtcctattttctttttctttaccactgacatcggcttatttcatatgaataatatattaaatacatatgcatttaaaatattgttttgatttgtttgcgaattgtttctcttaaagggtctatctggggaaatgagtaatttttcatatcctgttcttgcaggaagaattttaaatcgtttctccaaagacattggacacttggatgatttgctgccgctgacgtttttagatttcatccaggtaacgttgagagtaatgtcaggatctcaaatggaaaacggaagttcctattttttcaagcccttttcatggggtctgggggtgggactctcggcctggctgtgtgtaatgttaacttaataaagggccatgtttgtaaaagaaaggtgcggttataactcagaggctaagttggcatgagtaataccttgtgtgtgggagtggctatacagtcgcgtcagggttagtttgaagcagcttcgtgcttggtaagtggctctccgtctgcctctaggtatctggcgtggattttgctttactgtgaacacatttcataatacagaaacaatcacctctcacggaaagatagcctagattaactaaattatgcattgtattaccacaaagggcaaatacttaggcactttttttttttttttggatagaaccaggtgtggttacttacaaagaaaagattagtaataataaggtgaaaataatactttattaacaaggacaatagagagcagttattgcggatacaaagcctttaaaggcaaggatatctaagccaatttgagtacaggatcaaagtcaactcagaaaatgtcttttttgttttcacacgttgattgctctaagtcttaagctgtctttaaaaaaaaaaaaaccaacaatcctacagaaataccttctgtaaaacttttcttttgtttgtgaacttgaggctctaaaaaataatattgggtcatctctcatctccttattcagtactgttgctcatgtggtttggttttattttattttttcctattgtttaattttgtctacttgtcagtggttcaagctggggcactttttttttcccaagtgtttattttggaaatgcatctattaaaagctatacatattccaaaatctcagctgctgttgctaacactttatgaaatttgaacctctgtgactttttctaagtgccaacttagaatagttgtaatcattagctgaatttaaagccattaaatagaaatactacagttggggtctgcaattttggcttgatcctgtgatccccctacccctgcttttttctcaatgctcagatgctttagatctcctctggagccacagttataaaggaagcaaaattacttaatttggaaaattagctatgtaagaaaaatcagtcataggcttgaaatgcttataggaattcctgtttgtcacacagcaaggcagcaaatgagcatgtgactgcaaacagtatagcccatgggcgaaggcatccactgtttatggaggtgaagtaagctgagactcacaggtggattatttttactgcaaacaaggacctctgatttttttttttcttttgcaaacatttttaaaatgtgccctcctgggtttagctatattatttatccctcagaagccatcactaaaacagttgccccgtttacatagaatgcagattattgtctgtacacgttttgacagggattgttaattacttcaagaagattttgtgaaagtttctgtttctttgcaacaggaagctaggcaaaggttgagtttccgaagctggctggcccactatgtgcttagcagagtgagcggtcgtaattagtatcccttatgtgctttgtctcacatatggagggagagggatggatgctacttgatgtcaatataaaacatttcttagaagcatgaggagggaaaattctagtctcgttgtacttctatttaaccagagagacaagggcgtttgttattatccactcacataatcttggtaaacttaatgttgtggaatcctactggccccaattagctgatttcttgaatctacagcgaaggttaaatcctaatgttattgtctccaagaaaggagttttatctaaaggataacttagttatcaattatgataaagatctattgtcacttgttttgtttgcaggtgtctttaataaggcttcccataatcccttcaggaagaaatattttctccttttaaaaatagtattagctaaatataaaagctctggtccctgccattgttgttgattctttgagggacatttcccaacattcattgtttaaatggttgtcaggaagaatcaagtgaaacgtggtaaacaatgcagtaactggttcatcttactttgtgtgccgagcctttctcccggggatttgcattcgatgagtgggcttttgactgaggtatcgccaggatcattttgaagtatttgggcctgttgctatattaggaagtgaaaatttttattaaagccacccacccaaaaaaatgcatttaacctgccctcaaataaaggccaacaaaaatctaaatgtaaattttttttttttttttaagttgcctaggcctctctgtaaggatgaaaacagcccagtgctgttctgggactcttaatggaatcatgtaaacttaaaataaacactattatggtaagcacatagaatgaaaactaattttccaaatcaaatacattatattcaattcattttccccaatcaaccaaatgtttaaaacctgttagttataacagcaatcttctggaaattaattagaagcctattagctctgctagctgagccgaatgaagggggttgctcggtacatttctaagtagtctcctgaattaaagcaaagcaaggtcaaaatgacagttagctttgttcacctcatggctttgcttaaagtcgttgatcttttaggggggaaggagggaggtgttttgttttgcaaaggaaattttgtctactttgactcagttctgtgatacatttttaaaatttatttctagagccagtggggtgagccatacaggaagcctgatgttatctgtgtggatagtagccttctccattgcatgggcatctgaaatggagttgaattttaggcctcgtctaccgcatcaattcttctacagggtttatttagcccctttcaaaattcagatagtaggaaatttcctggatgactttgtgtttaacatccttagcaaaacatgcttcggacactggggccctgggttttgtggctgtcatcaggttctatgggtaataaacatgctgctgacatcacgggccctgggttttgatggctctcgttaggttcaataggtaataatcacagtgactagcagttcctcctaagcccagagaaactcacagaaagtgaggccttctcaacccagcagctgagattgactgaaacaattgagtttaaaaaaactggaaatttctttgtcaagatgttacccttggtgttatctagctgactgatcgacaggggaactacgtatcatcagaaccaactacggatggtattcttgagccagaaagaactttggcaggatgtatagtaacaaatagaatgaagattaaaatccacagaaaagttaggtatcttcataaaaagggagttgaaattctacacttaccagaacattcagactaagactgtcgagttgttattcttactaaagctgagatttaaaatcaaatagctatagaaataaataatgtagttgcatttatccatgtgactttctttttttttttttgagatggtctcactctgttacccaggctggagtgcaatggtgcgatctcagctcactgcaacctttgccccccaggttcaaacgattttcatgcctcagcctcctgagtagctgtgattacagatgaccaccaccactctaagctaatttttgtatttttagtagagacagggttttgccatgttgctcaggctggtctcgaactcctaacctcaggtgatccacccacctcggcctcccaaagtggtgggattacaggcatgagccactgcacctggcctcatgtgacctttttaatccagagcattcatgtttgattacgttttctgtatgatggtgatcgttttattggttttgtaagtaggagtctggaactgtggaccattgggtcagaactgaactgtttccaattgagtttgccaaagactggaggggtagatctgagaggagaaccctctgcttgtggcttggtgtctagaatgtaggctctgtagaagcaagtctgaaaccatgcacagattttattactctcccgatgaaatcgctgagataaggaaattctggtttacatgtgaccagatttgctggccagatagaggcaattaacctaactttgatttttggacttcaataaaatatttgtatttgtgagttttcatttgtttttatatagttagatgttggcactcattgcagatgggaacagtgacactggtaacttaaaagtgggtgtcatttgctgtcctgtattaagggaagaaacccagaggggcagcgagggtaatgtgtcactttggaactcagattggctcaggtgtgcaacagtagtgaataaagaaaggtgaggtttttgattaggccttttggaaggaaagccagaattaagggaagtttttgaatatatcataagatataaatatatcactggaaataaataacttatagaatacaaatgaacagtctgcaagttacctcaaggttgccatgggctaatcagataatttagccaaggctggcagtgcacatctggcttataaagagttgttcaaacatgtttttcttgtctgctttttcaaaacttgtaacagctttgaacatctacaatatttctaaagccaagtcatttatgaacatagaatggctcttcacaggttaaaagtgaatatcttgttttcataaagaattgaaatacaaatagcataaagatcttcatctggaacttatgttctttgaataggaatttggcattcaaaacatagtatgtttgcgtaaatcaacaaacaaaaacatagagatgatagtcaacattcacattttaaagtgcttgattacttcctttttttctgtggttttttttttttttttctttctttttttttttctgaaacagggtcttgctctgaagcccaggctggagtgcagtggcgcagtctcagctcactgcagcctccacctcccgggctcaagcaattctcatacctcagcctcccgagtagctgggactacaagtgtgcaccaccatggccagctaagttttgtatttttagtagagatggggtttcaccattttgcccaggctggtctctaatttctgaccccaagtgatcctgctgcctcagcctcccaaagtgctgggattacagacatgaggcactgcgctgggccagaagtgcttgattacttcctaatatcagcaccaatgccagcatcatgaatctcttcttccattttcttaaaacaataattggattaataggtaccctacctgtaatatttgtattaataatatcttattagcattttaattagaaatttaatattaatgatttggaatcagtagttttcaacaattttaatagtgcaaatttatttgtagtatttgatggggagatatggtgttttgtgactatatttacaactggatgtatctgggaatatctcaaagtttctcccaaaaggaaaacatttctattacaaatatgtgacttgtgaaaataatttgtaattcttttcaatatatctcattttttttttttttttttgagacagagtcttgctctatcacccaggctggagtgcagtggggcgatcttggctcactgcaacctccgcctcctgggttcaagcaattctcctgcctccgcctcccgagtagctgagattacaggcacccaccaccacgcctgtctaatttttgtatttttagtagagatggggtttcacgatgttggccagactggtctggaactcctgacctcaagtgatctgcccgtctcggcctccaaaagtgctgggattacaggcgtgcgccatcacgcctggccaatacgtgtcattcttattacatgtcttcctttttatttttttttcccaccagctttttattgagctcctactatatgctgagtatgcagaggtggaaaagatagaggctttatcttcatccacctgagaagcatttattgagtatcttgggtgtactaggccccatgttgggcttggagatatggggctaagtgaaattgaattcccttcttctatgagtttactctattgggagggacagatagaaagcagttaccatgctgtgtgataagacttacaatagaagggatactgtaggagagaatggttaaggtctcagcacgagacaaatttccaatcctagctctttcactttaagttcaattatggcttcctccaagactggccatgcaacacctaatgctggagtgaggactcaaaccctcttctcacagtgcagccatatgttagaataaatatctaaatagatttgttttgctttgcttgcctttgatttgtggctacaaaggacatacaaagagcaaaattcaaattttctggtccttaaatctaatctctctttaacttttggaaagaaactatgtgcatgccagactgttggcacctgtgtgtgtgtgtgtgtgtgtgtgtgtgtttgcacacctgtggctcaccctcaaatgtacccttctaattcttcatcctttaaggaccagcgaaagtctctctttcgcattagtgatgcttttctttaccactccattctgtaataaaacaatctctaggtcctgtaaaaagaagggatcatataacaccaggctgagcactgctctgagcatatttcacttgccccatctcatttaaacttcactcatagtcgttgagtcaatcagtatttcttggacacctcctgtatgccaagtacttttccaggatctagagcatggagcagttaactgggtatcagcttctaggaattggcattctagtgcaggaggtcgacaataaacagaccaataaacataaataatctaagttagtataggtctagtgtgttcagcaaaggaaagtgtttgctaatgactggaccagcatagtcaaggaggaggtgacgttgagtttgaaaaataaggaaacagccgtgcaaagaagatatgggggcaggttgagggaggggcacattgtatggaggaggaacaggtgccaggtctccagaagggaacaaagtggcatttcctcaggcagagagatgccaagcatgagcagggtacctgtagtcccagctacctgggaggctgaggcaggagaatcacttgaacttgggttgtagtgagccaaaattgcaccactgcactccagcctggacgacacactctgtctcaaaataaaataaaaaaaaaaaaaagaaaatagatttaacggactcacagttccatgtggctggggaggcctcacatggtggaaggtgaaggaggagcaaaggcatgtcttacatggcggcaggcaagagaacatgttcaagggaactgctgtttataaaatcatcagatctcatgtgacttattcactatcacgagaataccacgggaaaaacccaaccccatgattcagttacctccccctgggtccctcccacaacatgtagggattatgggagctacatacagttcaagatgagatttgggtggggacacagccaaaccatatctatcactaagtctctaataatagattatttgtcatctggtgcccacccatctccctatagaaagtcatataatgctcatttaatatgagcctatgatattttagatataaacctttcagaaattgtggtactagcctttttttcttaccccctgtgtctttagaattaaaggtagacaaacttagtttcctttccccaaaattcttttagacattttgagtggtcagtaagattcccagctgtggagactactcatttaaataactttattcctggttttatgataaacctggtctcaaacccaggtaccagagaaactgtgactgttttttagatatgagcatctggaagctcaggagagagaggacactagattttcttttctttctttcttttttttgagatggggtctcgctctgtcgcccaggctggagtgcagtggtgtgatctctgctcgctgcaaactttgcctcccagcttcaagcaattctcccatctcagactcctccacagtggctgggacaacaggtgtgtactaccacgcctggctaattttattttttggtagatatttggtagatacagggtttcaccatgttggccaggctggtctcgaactcctgacctcaggtgatccactcacctcagcctcccaaagtgctgggattacaggagtgagccaccatgcccagcctatatctttatctacagtattctgatgcacctttgttcaggttgtgatatatatagctctgtggtaatactgtataaacaaggaaaaacaattaactgtggcaaaagcaaaggcacatttctatagttactgttaaaaaataactttacattaaaactttgtaacaactggtgattgtacattgtactaatattattcactggaagtgcattctttatagaaagttacataagtatactaaagagttaaatttaaatactataaacatatacagtacacagcataaatatttttgtgaaataaaaacacctcatggtttaattaaatggaatgtttctgtcacaatttatactttgaatactctagttttgttttgttttgtttttttgagaggagtttcactcttgtcaccgaagctggagtgcaatggtgccatctcggctcactgtagcttctgcctccctgttccaagtgattgtcctgcctcagcctcccgggtagctgggattacaggtgactgccactatgcctggctaatttttttatttttagtagagatggggtttcaccatgttggccaggctggtcttgaactcctgacctcaggtggtccacccatatcagcctcccaatgtgctgggattacaggcatgagccaccacgcccagcctgaatactcttaaaaactgtctgtaaaggatctgaactcccccacagccccatgtatttgattttagacaacaaagtctgggtgccttatttcatgtgtgaaagagaaatagaatctcaggtcccagactccctatgccaaagggaaagttaagcttgggaacagagtcaccagtaccatctttcttttgttcccaaacagatagccatgatttcacaaccctactatcctgtgtcactgcctcatttcctgtactccctcctttatcttaatataaaatacagatcgactgagtgtgagacaatgcacaatccacattttcttctactccctcttttcacatgtaaaatgtagatatactggggctaatcagggtctcacaagaaggtgaccatctcactgtctaccctccctccctttttcttttttttatttttttttcccttctgcttgctcttctttaaatactgaagtttacaaaactccctctagaaaaaagcatcacagatgcccctgccacattctcatctgtggctaaataaacctctaatcgattgagacctgccttagttactttttggttaaaatatacgtgtgtgtgcgtatatatgtatatatatatacgcgcacatatatacgcacacacacgcacatacccctcaagaagcaattaaaccgttgatatgtaatcttccaattaaagtagcttgatgcccatcttaaactgtaaattgaggaaaataacatttgtggctgtaatagatgatttatgtagggctctagggcagtcggagtctacattttagccagccttgtaaacttgtgtatggaattcatagttgaacctatagagagctgaacccctctaaggtctttgagcagctaagtggcagctcatcttgtaattgtaaggttaaacaaggatgtgtgatgtgtgcacatgcatctctctcctttagagacgttattcccagttgatgggctttactgaaaatcagcgaggccggtaaccggcttaccctgtgcacacgtggtggttgtcctctgagttgtgcctggttgcttcctgaaaagggtcgttttcagagttctccctgctctttgcggtcacctgaaaaaggtctttgtggcagtggatgtctcctctatcttgctgttatcatcatcatctgcatcagcatcttggggttggacagcagatcactccattccaagctatgctgttgggaggcttcccttggctttggaactcttcacttaccccattgcaattcagtgtccagcagtgctgaggccactaggcttagtcaccatacttctgcctggtggaaacctgattgtgtttcaggtttggctttgttgtatgaggttttctgttttcgggagaattgtggatggagttagtgaaaccaatagcagcactaatggagctttatgcacatttgagtgaaactgaaagttaaggtattaacttctaacttgtccttgaacctccaggggtaaatgttaaatttattctttaattttcttgctaattagtgctctagggaggatgaagaagtgaacaactactcttgttgactaatccagtggtccccaacccctgggccacagaccagtactagtctgtgtggcctgttaggaacctggccacacagcaggaggtgagcggtggacaagaaaacaaagcttgctccccatcactcacgttaccgcctgacctctgcctcctgtcagatcgtcggcggcattagattctcataggagcacgaaccctgtgaacattgtgaaatgtgcatgctagggatctagcttgcatctaccttatgagaatctaatgcctgatcatctgtcattgtctcccatcacccccagatgggaccatctagttgcaggaaaacaagctcagggatcccactgattctacattatggtgagttgtataattatttcattatatattaccacataataatagaaataaagtacacaataaatgtaatgggcttgaatcatcctgaaactacctccatcgccatccatggaaaaattgtcctccgcgaaaccagtccctggtgccaaaaaggttgaggactgtgttctaatccacttgtttgttttcaccaccttctggattcacagcaccctccactccacctgtagcacatgcctgccactgggctgcctctggcggaccccattctctgccccaatccttggcctcattatgcttcctcagagtcagttgtgattcttcctcaacgtattcatgctacttatccttgttactgtaattttgtgatggcaatacttatcatataaactgatgaaacaggaatgccacaagaaagatttgtttgacaagtcgaagccttgggaaagaaatcttcactttaaaaaattgttaacaaattatgtgtggatgagaataaatggggtggagatgagaattggaggaaaataggattgtgtgctaatagcttcacatgtgtcttaaaattcatagatgatgtattatgtgtgtgatatatacataagaaagaccatgaaaatctccaacatcagacccggacatgttttttcatgcctgtaatctcagcactttgggaggctgaggagggcagatcacttgaggtcaagagttccagactagcctgaccaatgtggcgaagccccatctttactaaaaacccaaaaattagctgggagtggtggtgcacacctgtaatcccagctacttgggaggctgaaagaattgcttgaacatgggaggtggaggttgcagtgagtcaagatcataccactgcactccagcctgggcagcagagagagactccatctcaacaacaacaacaaaaaaacccaaaccaaaaaaacctcaaaaccaactttaaggattttgtattgtgtatcccttatttccatgctggccaaatacaagttcacatcacagcagcaaagggctttgtctgttgccctgcttggggaagctggtaaggcttcctggttattcctgagccatgtaggggagaaggaggcacatatggcaggaagtgcaggagtttaggatatctacagggacactgcagtgtggaatagctgcatcaggaggtttgagacaaggcattagaggagatcagatggagagatgcagaggggccagatcacaagaaggcttgtttcttaagcacaggaatgtagagtttagacatttgggtggaaggatatggagaggaatgggagactgtcagaaagatggggttgtaccagcatcaggaaaacaagaaaggatactggtttggacaagtttctctttaggacatccaggtcagaatgccttgtgtggctaatgaaagcccttgcttctgaatagggggcccacactgcaggatagtcgatcccctcaggcatgtgtcattcacaaggctgtgtcccagtagaaggccagttaggtttgcacacctccgtgaatgctttactagatcaactgttaaagctgtcagatatcttgccaatcctgtcaaattatagttgcttgcaaaattggagctgttctcaattccaaaattaaaaggaagccagcatcatttatgtggtctgtttagggtgattctacctcaggatatcagagccatgaaaattccctttgcaagtgctcttggttctctaggaaaagcttcaggttttgtttttgttttctgtttttttgtttttgagacggagtctcgctctgtcgcccaggctggagtgcagtggcgtgatctcagctcactgcaagcactgcctcccaggttcatgccattctcctgcctcagcctcccaagtagctgggactacaggtgcatgctaccacgccaggctaatttttgtatttttagtagagacagggtttcaccgtattggcccggctggtctcgaactcctgacctcgtgatccacccacctcagcctcccaaagtgctgggattacaggcgtgagccactgcgcccggcccagcttcaggttttaaaggtgtgagtgttgagtgtgctactgtgaataagattagatgtgactgggccaggtgtggtagttcacacctgtaatcccagcactttgggaggccaaggtgggtggatcacttgaggtcaggagtttgagaccagcctggccaacatggtgaaaccccatctctactaaaaatacaaaaattagctgggcgtggtggcgggcccttgtaataccagctacttggggggctgaggcagggagaattgcttgaatccaggagacagtggttgcagtgaaccaagattgtgccattgcactccagacagggcgagactcgatctaaaaaaaaaaaaggtgtgactagatatcacttgtaagtaaataacttcaaagtataatgtaggggccaggtgtggtggtccatgcctgtaatcccagaactttgggaggccgaagtgagaggattgctcaaggtcaggagttcaaaaccagcctgggcgacatagtgagacccccttctctataaaaataataaaagactttgccagagatggtgtcttatggttgtagtcctagcaatttgggaggccgacctggaaagaactcttgaacccaggagtttgagaccagcctgagcattatggtgagaccctgtctctacaaaaaaataaaacaattagctaggtgtagtggtgcgtgcctgtagtcccagctactctggaggctgagtccggaagatcacttgagcccagaagttcgaggttgcagtgaaccacagttgtgctactgcactccagcctgagcaacagagccagacccagactcaaaagaaccaaaaaataataataaaaaatttcaagtgtagtgtaggatggaatgggagaggcttggaatcatccttcttaagtttgactcctagctctaccgcttaccttctctttcctcacaaagccacatgctacgtctctgtaaaatggagaaaattctacctattccatgagggttattgtgaggataaaatgaagtcatttcaataacattcttagcataacatctaagctcactaaataaaaggtactttttaaatactacgtatatttttaagtgggagaaatagcctgacaatgacattatgctgcattaaggtaattgtcagacagttaccagacccataagtattaggacatgagtttgtattccagatattaggtttattatccctgaaggctttaatggctattttctcttctggaaccacagtatcaaaatcagttgttttcagaataaaccagtgagcactaaatatctcataataacgtaattttcataatattgctgaaacttccttggcccttgataacattgagtgtagagtctgagttatctagacttctgctagctaaaatctttgcctctaagaagtcttcctactagaaaaaaacaaatgaaaaatgaagataagatgcagaggttggatttaggcattttaattttttctgtttaaatttgggagtgctccgagtgtgctaacttgcacacagctgcactcagcaaaatactgtaatatattgaggcacacggaattgcaaaacctttcttccctacacacccctcatctaaaaaaaaaaaaaaatcagcagcttgactgagcttaaataactgacttttcatatcctttcatggaacacaaaggactagtcctgaggctacttgagccaccaatgcaggcagcagtggagaccaccactgaatgtgccagtccctcctcccacaaacaaaacacattgactgcagctttatgaagtgaaatgcccaagaaaaagaaaatgtgaaggaggtgtcctcagtcatttcttccctaggggggtgggagggcaggatgaggggcaggagaaaaagctgctgcatctggatgtggagaacaaagccatcctaagacttgagtataataggttgggtcactcgcttttatagaagcaaaagagtggaactgccttgacttgtctcagtaccactgacccttacatttcattgtgtagagatgtcagggaaagtgtgtagaaagcacactgaacaatgactttgtcattttgagatttctgaggtttgttcaccccttcccccaactcctaccctcaaatccccattggacaaaagagatcgttagttaggtcgccttgccgtcatttgaaagatctctgttttactgagtctttcaaaagtaaactcatccattttaactgaatcacggcgttctcatgctttcaaagtcaacaaaagagttttagtcactgcatttacaaggatggactagtctgtgaaaatgccagccctagagataatgattcatgccaactgccacattaaagtggatttccttgttaatagacagggcagttgatgacatgagttactggaaatatttgccaactcttgacccctggatttctgagatcaggatgataggattcacacaggcccactctaacaattcctttaccttttcttttttaatgaaagatgcaatggttgggttttttccagtgtgatagcacatgtagaaagcagtactgtcaccattagtgtggtgacagttaatcactggggaccctcccaggcttcccaggctggcaaccagtgttccaatttttcccagcatgtgtgttccaatgataatgtttgtagtttaacaagaagctaattaagacctaaagaaaaaaattaagagtctcatttttatcaagtctggtggtattcagcagaccatagaactttccattctggcatattggatgatgtccattgcaaaacaatagtggccattcgtggtgctttctcttcttgtcattttgcatccttagtaatgataaaatggacagctattacccaggagaggaaaatggccaaatgtttacttaattgaggacctttaaattctctctatgctattcttgattgattacattcatttttgtctgtatacctactgagttttcttgataagatgaacaaaaaaaggtttggactggagaacttgcctgagttttattaaaatcttgcagtcactattttctatatggatgtatcacttccatctgatgtggggcatgggtaagtgtaatctgttctacttgtgagttttgtgactcacttgttttctttcagccctttccctgggttcattgacttagtgttctctctcatttgcgttgagtcatgaagccgatagtgccgcttgtgcatcgcagcaaagggccagccacctatgggacacgtatcaaacatggatcaggagccatttttgttctagggcacatgggctggttaccattagttctcacatttgccctttcccaccctcaatgcacctgaggagatcatctcttagcgttatggttgtgtattgatacactgcccaacctctgcctgaacatggccaaagggatgggaatgaaattctagtgtcatattttttttaccctatctatttttattgaggtatagtttatatacaataaaatcgacagttttttttaggttgaattttactaattgtgtacattccaatatccaccctctaaaacaagatgtagagcatttccatctcctcaggaagtctcctttgctcctctgcagtcaattttcacacctctacacctcttccagatttctgtcaacatcaattagttttcctgttcttgaactacgtataaatggaaccaataatttttctgtggctggattcttttgttcaccatgtttttgagttctgtgtatgtttcagtggttcatttctttgttttctttttctgagtgatatttcattgtatgatgacatcaacatttatttgtctactctctgattgatgggtatttgaattgttgccagtttttagcaatgaatgttcttatagaagtgtttatgggtacactacatatgttttcattcatctcagataaaatgcataggagtggaattgctgggttcgtaaagttcactttaaaaaccaaaaatcaaactatgacaaggatttttataatggttgtactattttacacacccagtggcaatatatgagcattctagttgctccacatcctcgccaacatttagtatgatcaatctttttgtttttattctttttagtagagtatagatgatccatttgcattgccttgatgattaatattgagctttttccatacaggctaattggccattcaagtgtcttattttctgaaatactggttcagatctcctgccagctttttaaaacgtgtttttaaaaatcttgttgattttttagtttttaatatacataagtgtatttgtatatgtttaatattaggcatttgtgaatatttcctgttttgcaaattgtggtttttaatacatttgcttatttcgtcttcactggagaactttttgcatgaaactgttcataatctcacatttgtccatttaatgtctttataatctatagtgaaatttcttcttttattcctgacactgataatttgtttctgtcaatcagtttagcttggagtttatcaattttgattttttttccagtgaattcatgtttgattttgtaattttctctgtagttggtagattttctatttcattaatttcttatattttttaagttacattgatttaatttatctttttctttagctttttaagattgaacattaatctgttggttttcatttgtttcataatatatgcatttaaagttatacttcctctaagtattgcttagctgcatccaatgattttgatatgttgtgttttcattatctacagttcagaatatttatgagttgactttttttttttttttttttttagacagtatctcactctgtcgcccaggctggagtgcagtggtgcaatctcggctcactgcaacctccacctcccaggttcaagcgattcttgtgcctcagcctgttgaatagctgggattacaggcgcacatcaccacacccagctaatttttgtatttttagtagagatggagtttcaccatgttgcccaggttggtctgaaactcctggcctcaagtgagcctcccacctcagcctctaaaagtgctgggattataggcgtgagccactgtacctggcccatgagttgactttctgaagtaatattttagtagtgagttattatggagtatataacttcatttctaaagatttagggatttttttttttaaaaaaccttactgttactgatttctaattagccttgttgtaattcgataacatattctgtaatatttctaacctttgaaatgtattgagacttctttaatggcccagtatttactttactttggtaacggtcccctgtgcatttgaaaaaaaaaaaaaaaaaaaaaaaagaatgtatattctgtagctgtggagtatagagttctaaaaatgacaggtcaagttggcttataatatctggatcttcagtatctttactgaatttttgtccactgttctgtcatttactaagagtggggtgtttttgcttggtatctctctctctctctgtatttacagtctttgttgtaagcagcatctaattaggtctggctttttaaatgctcagctgaaattctctgtcattttatgtggagtttcatccatgtacatttaatgtaattatagatacggttggttttaagtctaccatcttggtatttgtcttctgttagtctcatatgttcttttccttctttgcagtgaatagaatatatgttcttattttattttttctatcacatttttagctctactctttatgttattgtttttagtggttgctctagagtttacatatccatttaagtttattgcaatctattttcaaataatttcctaccaaatttgcaaacaatagaataatcttactattatataatttatttctgctattctttgggcttatgttgtcatattgtttacttctacatatgctataaacttcatgatatattgggtccattttgctttaaataaccaatggtcttttaaagaaatttatacatatgtatgcatgtatgtgcatacatattatagaaaattgtgttttatatttattcacatatttgtcctttccagtgctctttatttctttctgaagtctgagcttccatctggtatcattttccttaagcctgaagaacttcctttcgggctggtctgctagagaccttctcctagcttttgcccatctgagcatgtctttatttcaactttgtttttaatgatcttttcaacagatagaagattctaggttgacagttttctttttttttcctttttttggcactgtacatatatcacatcattgtcttctcccttcattgtttctgatgagaaaccatcattattatgcttgttgcactatacattatgactcttcatggctgctttttaaaacaatttcctctttgagtttttgctgtttgactatatgtgtttagtatccttcttgggattaatgagcttcaatatatgggttggtatttttatttaattttggaaaattatgagtactttatgttttgatacacttttcttttctttctcttttaactccttaacttctgggactgaaaatgatagtatgttagactgtttggtgtagctccaagatctagggtgttgcattccagtctttcagtcttttttatttttgtctttcatttggataatttgtattgctctgtctttagggtcattgattctttctcttatcccaatctgctgccagcccattgaatatgtttttttttttctttcatagagatgggatctcgctgtgttgtcctggctggtctcaaactcctaggctcaagcaatcctcctccctcctcaagcaaacctcagtgctgggattataggcatgagccactgtacctggctaaatgttgtttttttgatattcaatttttgtttatagaattttcatttgttttgctcttatacttttcatctttttatgtttattgaccaattgaatatcatttgggtaagcacctatttaagtgtcttaacaatttttctattgagtactctgggtttttgttttgtttttcttactgatttgtagaattctttatgtattctgaattgcagataccttccttctgtactaatgcttatctttttagccctgtaatattgtgttttcataaacatacttatcaatcttttcctttatggtcattgatttttgtgttctgtttaaaaaaatctgtatctatttcagtgtcttatttatttatttgttagttttccataagttactgaggtacaggtggtatttggttacatgactaagctctttagtggtgatttgagagattttggtgcacccatcacccaagcagtgtacactgcaccatatttgtagtgttttatccctcgccctcctcccactcttccccctaaacccccaaagtccattgtatcattcttatgcctttgcatcctcatagcttagctcccatgtatcagtgagaacatacaatgtttggttttccattcctgagttacttcactcagaataatagtctccagtctcatccaggtcactgcaaatgctgtcagttcattcctttctatggttgaggagtattccatcagatagatagatagatagatagatagatagatagatagatagatagatagataatctcacagtttctttatccactcattgattgatgggcatttgggttggttccatgattttgcaattgtgaatcgtgctgctataaacatgtgtgtgcaagtatcttttccaaataatgatttattttcctctgggtagatagccagtagtgggattgctggatcaaatggtagatctacttttagttctttaaggaatttccacactattttccatagcgactgtactagtttacattcccaccagcagtgtagaagagttccctgatcactgcatccatgccaacatctactgttttctgatttttttattatggccattcttgcaggagtaaggtggtatcacattgtgtttttgatttgcatttccctagtcattagtgatagtgagcattgtatatcttctttccagaattttctcttcatgtcctaagtccactttctgatgagattgtttttttcttactgatttgttctaattcattgtagactctggatattactcctttgtcaaatgtgtatagattgtgaagatttactcccactctgtgtgttgtctcttcactctgctgaatgtgccttttgcggtgcaaaagctccttagtttaattaagtccctactatttatctttgtttttattgcatttgcttttgggttcttagtcatgaaatccttgcctaaaccaatgtctagaagggtttttccaatgttatcttctagaatttttatagtttccaggtcttagatttaagtctctgatccatcttgagttgatttttgtataaggtcagagataaggatccagtttcattctcctacatgtggctagccagttatcccagcaccatttgttgaaaagggtgtcctttccccactttatgattttgtttgctttgtcaaatatcagttggcggttaagtatttgggttctctattctgttccattggtctgtgtgcctatttttataccagtaccatgctgttttggtgactatggccttatagtacagtttgaaatcaagtagtgtgatgcctccagatttgttctgtttgattagtcttgctttggctctgcgggctcttttttggttccatgtgaattttagaatttttttttttaattctgtgcagaatgatggtggtattttgatgggaattgcattgaatttgtagattgcttttggcagtatggtcattttcacaatattgattctatccatccatgagcatgagatgtatttccatttatttgtgttgtctatgatttcttccagcagtgttttgtagttttccttgtagaggtcttttgattccttggttaggtatattcctaagtattttattttattttaatttttgcagctattgtaaaaggggtttagttcttgatttgattctctacttggttcctgttggcgtatagaagagctactgatttgtgtacattaatcttatatctggaaactttgctcaattattttatcagttctaggagctttctggaggagtctttaggctttccaaggtaaacgacagtttgacttcctctttaccaatttggatgccctttatttctttcttttgtctgattgatctggccaggacttccagtactatgttgaagaggagtggtaagagtgggcatccttgtcttgttccagttctccgaggaaatgctttcaacttttccccattcagtattatgttggctgtgggtttgtcatagatggcttttattacattgaggtatgtctcttgtatgccgattttgctgagagttttaatcttaaagggatgctggattttgtcgaatgctttttctgcatctattgagatgattatgtgattttttggttttaattttgtttatgtggtgtatcacatttattgacttgcatatgttaaaccatctctacatccctggtatgaaacccacttgatcatggtggcttatctttttgatatgttgttggattcagttaacaagtattttgttaaggattttagcatctatgttcatcaaggatatcggtttgcagtgttctttttggttatgtcctttcctcgttttggtattatggtgatgctggctttatagaatgaattagggagggttccttctttctctgtcttatggaatagtgtccaaaggattggtaccaattcttctttgaatgtctggtaaaattctgctgtgaatctgtctggtcttggacttttttttgttggtaatttttaaattaccatttcagtcttgctgcttgttattggtctgttcagggtatctaattcttcctgatttaagctaggagggttgtatttttccaggaatttatccatctcttctaggttttctagtttatgtgtgtaaagatgttcatagtagccttgaatgatcttttgtatttcagtggtgtcagttaatttttctctcttcttttcttggttaatcttgctaatggcctatcaattttatttaccttttcaaaaaaccagctttttgttttatttatcttttgtgttttgttgttgttgtttcatttcatttagttctgctctgatcttagttatttcctttcttctgctgggtttgggtttggtttgttcttgtttctctagttccttgaggtgtgaccttggaatgtcagtttgtgctctttcagctttttcaatgcaggtgtttaaggctatgaactttcctcttagtactgcctttgctgtatcccagaggttttgataggttgtgtcattattgtcattcagtttgaaatattttttaatttccatcttgatttcatttttgacccaatgctcattcaggagcagattatttaatttccatgtatttgcatggttttgaagattccttttggagttgaatcatatggtctatcttggaaaaagttccatgcactgtcgaatagaatgtgtattctgcagttgttggatgaaatgttctatttatgtatgttaagtccatttgttccaaggtatagtttaaatccattgtttctttgttgactttttgtcttaatgatctgtctagtgctgtcagtgaagtattgaagtcccccactgttattgtgttgctgtctctcttatttcttaattctattagtaattgttttataaatttgagagctgtagtgttgggtgcatatatgtttaggactgtgatattttccttttggacaaggccttttactgttagataatgtccctctttgtctcttttaactgctgttgctttaaagtttgttttgtctgatataagaatagctgcccctgctgtgtttcatgtcgatttgcatgaaatcctttttccacccctttaagtttctgtgagtgcttatgtgttaggtgagtctccagaaggcagcagattggttggtgagtttttatccattctgcacttctgtatcttttaagtggagcatttaggcaatttacattcaatattagtgttgagatgtgaggtactgttgtattcatcgcgctgtttgttgtctgtgtactttgtgttttttttgtttgtttttgctttttaacttgtatttttgttttataggtcctgtatgatttatgctttaaagagtttctgttttgatgcgtttccaggatttgtttcaagatttagagctccttttagcagtttcttacagtggtggtttggtagtagtgaattctcttagcatttgtttgtttgaaaaaaactgtatctttctttcatatgtggagcttagtttcactggatgcaaaattcttggctgatcattgttttgtttgaggaggctgaagatagggccccaatcccttctagcttatagggtttctgctgagaaatctgctgttaatctgataggttttcctttataggttacctggtgcttctgtctcacagctcttaagattctttctttggtcttacctttgggtaacctgatgacagtgcacctaggtgatgatttttttcaatgaatttcccaggtgttctttgtgcttcttgtatttggatgtctaggtctctagcaaggctgaagaagttttcctcgattatttgcccaaatatgttttccaagcttttagaattctcttcttcctcaggaacactgattattcttaggcttggtcgtttaacataatcccagacttcttggaggttttgttcatattttcttattctttttccatttgtatttgttggattgggttaattagaagaccttgtctttgagttctttcttctactacttgtttcttcttctttcttctacttattcagttctattgctgagactttccagagcattttgcatttctgtaagtgtgtccaatgtctctcgaatttttgattttttttaagctatctgtttctttgactatttctccctttatgtcttgtattatttgttggatttccttgcattgtgctttgcctttctctggtgcccccctgattagcttaataactaacctcctaaattctttttcaggtaaatcagggatttcttctcagtttggatccattgctggtgaactagtgtgattttgtgaggctggtaaagagccttattttgtcacattatcagagtgggttttctagttccttttctcatttgggtaggctctgtcagagggaaggtcttgagctgaaggctgttgttcagattcttttgtcccacagggtgttcccttgatatagtactctctcccttttggtgtggatacggcttcctgtgagccgaaccgcggtgattattgtctctcttctgggtctagccacccagtgagtctgcctggttcccggttggcactggcggttgtctgcagagagtcctgtgatgtgaacctcacagagatctctttgggtctctcagccatggataccagcacctgttccggtggaggtggtcggggggtgcaatggaccctgtgacggttcttagctttggtttaatgctctatttttgtactggttggcctcctgttggaaggtggcactttgcagagagcattagctgtggtagcatgaagaggaactagcagtgcacaggaccctaggactccctggattatatgccctttgtcttccactaccacggtgcgtagggaaggaccatcaggtgggggcagggctaggcatgtctgagctcagactctccttgggtgggtcttgctgcagagtatttggggtgtctcctaggtcctgcagtagcagtccacttccttcaaagggtctgtggctcctcttgggattgctggtttgttcttgaagtcgatccagagctaaagttcacatgcaagcctctgcacactgctctgttagtccgagtcagagctgcaatctagtcctgcctctcgtctgccatgatcccacctcttgggattggcttctttttttttttctttttttgacagagtctcactgtcacctaggctggagtgcagtggcatgatttcggctcactgcaactttcatctcctgggttcaagccctggtgttttcttgccactatttatatgatcatgtggttcttcctgtttcgttaacctgataaatagcattgattgattaattgtcagatcttaaatcaggcttgtattactggtgtaaacagtttataaagtataattattttttatgttcttagattcagtgtatttagtatgttatttagtgttcttttttgttgttgtttgctttttcacccaagctggagtgcagtggcgtgatctcagcttccggttgcaagtgtttctcctgcctcagcctcccaagtagctgggattacaggtgcccgcgaccacgcctagctaaattttgtatttttagtagagacggggtttcaccatgttggccaggctggtctcaaactcctgaccttgtgatccgccctccttggcctcccaaagtgctgggattacaggtgtgagtcaccgggcccggacttagtgttcttaacacagtttggtttataattttcctttctttggtttttatatcaggataatgctggattccaattctctagaagaatttgataaaacttctgcaaaatcatcttgtgacccatctttgttttttctatgggaaatttttgtgtcatgaattcatattcttaaattcaataatagaattattcagatttaggttttttattatgtcagtctttgcccatcatttttccagaaatttgccttttgcatcaaaatttttaatttattggaacggtgtttattatatattctttttaatgcctgtagtatctcttctgttattccctgttaattcatgataatgataattttcctctctttttttcttgattagtctttttgaagtttattgatttcatcagtttttttatataatgaggctttgggtttgttgatttttctccttcaaattagttttctatttaatcattttctccttttttctaatttccatttttctcagattttaatttaatatgctactcatttttctatctttgtaaggtatatttttagatcctttacttttaacctgtctttaaaaaaaagtttgaaggaataattttacttgtaaacagcattagttgcagtcctgaaattttaatattattaggttttcattttcttttatttgaaaagtttctaattttattgtaatttatttgaaacaggtgttatatagaaatatattgctgaattcctaacatttctagttacatttctaattacattgatttcatgttaaatccacttatgtcagaatatattctgtataatatctgtctcttgaagtttgatgatacttgctttatggcataataaagatgcacttgaaaagtgtgtttatgcagttattggctatagtattgtagcctttaggtcatcattaagtcaagtttattaatcatgttttcaaattttctctgtcgatttttatgtgcttgttatatcagttattaagataagtgggttaaaacttatcttttatttccacttttatatgccttttctaagatgtgtatttttaaggtagcatatagacggacttcagccttgaatttcataataaacattaacatggaaaaaatgtacaaaggaaaccatctgtcagtgagatatgctgaccacaaaggaagggagaggtgcaccacattgctctaatgccttacaccattcactcttcattggagttagctgggactcaggattaagcactaaccgaagtccaacacaggtaccagcgctggatgtcaaaagatcagattagcatatgagggatgaaaggagtgattaatgtatcccaagggaaggacaagtttagaaaagcttagagaatgtttgtttagatcttgtcatacacagaagacataccaacactccataaagttctgatttaaaggcattcactgggttggatgaggtaacaaaaaaaacagatgtaaagtagagatctccccaggtgggacctgggaaccagagttgacctctgaactccctgaggcaggtgagatgctacagtagcacataatttacatctgctgacttagtgctgatgctgtcagtatttgggcttaggagcttacatttaagtgtcttccatattgtcccttttgcttctattcatcctgtaattgaaggtaatgataatgatttgacagaattacatttttatttcttaatattcctgtcggtttgtataccctgttcataattttagtggctccagaagaaatcctgtattagccaggagcacaacctgttatgttagtcatttcattgagaagtaggttttatttttttttgagacagagtcttgctctgtcacccagtctggagtgcagtggcatgatctcggctcactgcaagcctcagcctcccaagtagctgggattgcaggcatgcaccaccacgcccagctaagtttttgtgtttttagtagagacggggtttcgccatgttgcccaggctggtgttgagctcaggcaatctgcctgccttgacctcccaaagtgttaggattataggcgtgagccaccgcaccctgccagttttttgtttgtttgttgtttgtttgttttttgttttagtctcatgtgttcccaaaataaataagtagaagaatttcttctgccaccctatcagtaaacaccttactgatcaaaaactagtgggcaatttttttctctctaaatcagaagaaaatcttgccatagtctctcaccaagaagtgaaccctgctttgtttattacacctaagatttgtcttctgcgaagtcagtaatcgtttaaagcaatctggatgatttgtacttatcacagcttagaacacaattcttcagtggcttacagcagaattaaaagctttccactttctgtgaggtgttagcaaccttaatgatcctgattttatgttttaataccataaacaaatcatgaaaataccatctactgattaagtgacctcatgattaaatacatatttcatcttgtacctaatagaaggttgacagagagagggagagttcaaatgaggaatagaatgagccagaaggatggatggcatttttatttgcagaaaataggaatacatttttactgctgtttatagaaaacatgttcgttggcacaagcttcacaaagactagcaggaacagaatcccacaaaatgaagtttaaagtaaatagtggatagatacctaaaaatttctccaggactcaaagcagtttggtggttaaatgccaaacaggcattgtagttaaaattatgcttgttaaaagaatatgttccattctgtaatgttcggatacaaaattaattctagaagagtctgccgggggaaattttatatttttcactaccattcaaatatagatattgaatatgaaatgtattcaaccttcattttgtgtcctgaggttttatatatttattaaaatgtggttcttctttttttcttaagtcattttgttttctgggtctagaactcatctttttgtaagacttttagatgtaaacaataattcttaaatcaatatgtgttgccatgttctattagcaaatattttaagactttttaaagatcagctcttctttttgagctgagaagtctgttatttcctaattagctgggagctgggattggtcacctcactgagagaccagatataaccacacacacacacacacacacacacacacacacacacaataaccttaaaaactagaaaattcagaaaacaaaaatataaaaaatacagatatatttcggtattaaatgctttaaaaaatatgaatcgtgtgtaggatatagtatcttgcagtgattaagagaacaggtgtaaggtcagtatgactgaattttctgtctttgaggaagttactgaacctctctgagactcagtttcctcctgtgtaaatggagatgataatccctcctatttagatatgagagtgaagttagataatggatgcgaaatacatatgtactaaggtttggatataagcaaggcttatgacatgttgcctcttcttggtttttgggagggcagggcaattgtacctttctttggctgtcagctaggtacagaaaattgtgggtggcctagtaggccagatgctgggctggtgggtcaagatgcaggtggtggtgctgagaagacacacacagaactgcctgtgttcccgcagcaagcaaactgtgattgcgacccgcaagtgattatttatgctgtactttctggttgtctgttaaacctgcctgtgaaaatcagttgtaagtcttccttagaaacctctacaaagtgtgcatgtattcctccttatatttctttttgtttgtttgtttgttttgttttttgagatgtagtctcactttctcgtccaggctggagtgcagtggcaccatctcggatcactgcaacctccagctcccaggttcaggcagttgtcctccctcagcctctcgagtagctggggttacaaatatgcggcaccacacccggctatttttttttttctcagtagagatagggtttcaccatgttggccaggctggtctccaactcctgacctcaggtgatccacccgcctctgcctcccaaagtgctgggattacaggtgtgagccaccacaactggcctctccttatatttctatagcactctgtactttctgctgaagtcatgtacttttatgtaagacagtgaactttggaggcctcagagcatgtataacgtgaatctgcacgtcccccactgttctatccttctcaagaagcaagcgttgtggtttcagagtaggtagggactaacttgagttgcactcatatttcccgaagccatagaccgtgatatcacacgtttcctaataaagatgaatactgaaatgagcatcatccagtgtcttgggtttttatgcttcttgcttttgtttttatatttcaccttttagaccaaggtaatttccaaagataatgtcaccttgctgggtgaggtgatgggtaagtgaacattcacagacccgttagcacagtgccttgcacgtgctcatacatgtcatttgctattgttatcatgtgcctctgaaatagacgtttgaaatactctcctaatcgtggaaaatttaatgcatatccaagtgttaaagctaaaaaaaaaaccctgttagacattttgacttgttttcttgttatcaaacctcttcctcagtgctactaaatgtaagagaaatagaagacaaaaatttctgacaatataaaattcaatatattgtaataaaaagaaaaaagtctcaggtcttttaaaacatgtaaaatttaattacatttctcttatctattctttattgggcatgttaatgaactctaatttcttatgtaagtgtgtttaggggaaaaattaaagaaaaattcagggattttatcctgaccaataaaaagctagccgtatgctggggacaagctaaaatgtagtggctgacaatgcatgctcctcagctctgtgactggtgctgtgtgttcttgatcaagttacttttttctccctgtgcctcagtgtctccatctgtaaaatggtgtagtaatactacttcatagggatattgtgagatttaagtgagttgatacatgtgtatttaatatacagccagatacacaatcagcattcagtaaatgttagcaaaggatagataccaagagagatgactccccacttccaaaggtgaagatttaaattatttcctttttttctgagcactgaatttgcaattagtcacttccttatcccgtgcatagctgaggcttctgggttccttgtctatgatgcctgcttgctcatttcccgcataacatcaactgactcatgatagtttgggattcaagtcctactctaaatctcagttttctcatccattaaatagggaaagtaataatgcctgactcatgaggctggtgagtgtttcaaaagaactaatgggggcctggtgtggtggctcacgctcataattccagcactttgggaggcagaggtgggcagatcacttgagatcgggagttcgagaccagcctggccaatatggtgaaacaccatctctactaaaaatacaaaaattaggcatggtgacatgcacctgtagtcccagctactcaggaaactgaggcaggagaatcacttgaacacgggagtgggaggctgcagtgagaggagatggcaccacttcactccagcctgggtgacagagcaagactccatctcaaaaaaaaaaaaaagaaaaaggaaaaaaaaacctaatggataagtttatatcatagtgtttggcacatggcaggcatgtaatagatatcatcaggaccacctatacttttgttattcctttgtatggaaaagcagtccctggtactacaataagtctttcagagaaaggagtgtaatcctaacaacaactcatgaaagtatttttgaaaagaatacttgataaggaaaacctgcatctacttctgctatttcagacattgctacaagtggttggtgtggtctctgtggctgtggccgtgattccttggatcgcaatacccttggttccccttggaatcattttcatttttcttcggcgatattttttggaaacgtcaagagatgtgaagcgcctggaatctacaagtgagtatggaaactcgggttggtatagacatgctagctagtttccatttatgccataaattacagagaccccctgaaattcggcagactctgtcttccagaatttctctaacattaggtaattgaacgtattggccattatgaatcattgtgtcccttagagcatgtggaattgatagcctgcaacgtgcaactttgcatttggaataaggaaggagtgaaggccatatggggagtaatattctacaggaatgtcagcactgtgaagacagggactctccgtgtcttgtttatgacatactttcttacacaaagccggcacttaattaaacatttttcttagaaataaaatatttgatcatggtgaaactaatatagaaggaaaataattagggtattttagcatctttccccgaagatactaaaagtgacaaggaaatgagaaggatggagaaaggaaaagaggtgtcagaagcaatgtatttggtaaatttatgacttttgcaaactcacaaaatggctaggaagttgcagttttaaacgttttgaaaagataagcattgttattttcagttttccatttgttaccagcggtgcttgttctaatgtcacagtttgaggtttttccccctcaggctgtttatatatatatggacactgaaaataatccccttagatcacaaggagatatatcagtttagaaaacatatagtctgttgctctcttcaatttcctagttttggaatcatgaggaagacattttatgattaatcactctattccacatgtaatcgcagagatgaaataatccagagttcatctcattatgcatgcacaaattaacatatttcatcattgttaaacacaaactcataaggagagtagaattgctttactttttaataaaaggtataaggataatagccaaaaaataaagaaggaagatatttgtatcagaaaagctgaatgccaactcagctctctggaagccacgcctagaagagaagcattgagtcccatcattttcagtatcttctactgagtggtaaatagaagtttattaggacaaagcagtttttggttgtgacatatatatgtttctcttttaacaatgaacatttatttatttatttatttattttgagatggagtcttgctgtcacccaggctggagtgcagtggcgcaatctcagcttactgcagcctccacctcctgggttcaagtgattctcatgcctcagcctcccaagtagctgggattacaagtgtgcaccaccacacctcactattttcatattattagtagagatggggtttcaccatgttggccaggctggtcttgaactcctgacctcaagtgatccacctgcctcagcctcccaaagtgctggaactacaggtgtgtactgctgcacctggccaacagtgaactctaagaggcatttatcctaagtgtctgcatgaagtagaaggggtgacagtccataaaagttgtagaaaaacttttcagtcatcaagaaaaccagctaagctaccatgaggtctagtcttgtaaggttttcagtgggcaggccgagcagtggagtccacatgtgagtaacacttggccaataggacttgctagggaaggtagagtataattgctgggagaccttccttgtgcagatgactggccctagccagtgttgtgtgtggacagcaaggctgtgcaggcattttatggtttgggcccgctcatgaaatgaagttattcgagagtcttgttttaagggagtctgtggtatgttgaaggaagcagccgttccagaaggaacatcttgacgtagactgtctgtgtcaacagccacatccgatccatgtggatgtggagaaaagggggacttaggaaggctttttgggaagcagtgtaggattttctctcttgaatttcagcatgtaccttaaagcttgaaaacattttcatgtggagattctgacaaccttatcatggcccctgaggcatatttgggtgttcccgtaccctgattggctgtaacaatgagttaaatatgcaggattctttctccatgcgctcagatcaccaaccacgggggctggttggttggaactatttactgttattcgtccagggtggtgggtctctgccataagtcacaattccactgtttcttctcagcagcagtggatcgtggtttttgagaccactgctggagtcaccagctgaaagcaggatgcctgactgccgtggcagggaggcataatccagcttcatccttgtgccctcaaggatttccaaagcctctgttggactgcctcactgcccctggagtcatagccggcatttaatgaatcttaataacaaatctgggccgggcgcattggctcacacctgtaatcctggcactttgggaggccgaggtgggtggatcacttgaggtcaagagttcgagaccagcctgaccaacatggagaaaccccatctctgctaaaaatacaaaattagctgggcgtgatggtgcatgcctgtaatcccagctacttgggaggctgagacatgagaatcgcttgaacccaggaggtggaggttgcagtgagctgagattgtgccattgcacttggcaggctgaggcaggagaatcacttgaacccaggaggcagaggttgaggtgagccgagattgcaccattgcactccagcctgggcaacaagagtgaaactgaaaaagcaaaacaaaacaaaacaaaaaacaaaaactaatctgcagttgatcattttatgtttgcaagagtcaccatatcaacagtcagtcatagagaagtacataaaaaccggaatggcatttggctgcatttctctagccacctccactcatttggcaatgcctgaaatgtgaagccgtatccaatttctgtttgtaaagatattgtgatccactagcaatgtctgccatgagtgtgaacccatgtgtcccatgttcgttcatcctagattcccagggactttgttcaatgcaaggtggttaataaccggcacaggaatagggaaggctgttggatattagctaagtaagattaggggatttttaaagcgtgggctacaaagtctggagaaaaatgccctcaggatgcatgagaacctttaactctgattattctctctctctgatactgtggctcagattaaaagcacagccttggaaataaaacagatatgagtccatgcccaagtctaccacttgcgtggcttactttacttaaccttgggcagtgttttttttgttttcttgtttttgtttttttgagacatagtctcactctgttgcccaggctagagtgcagtggccgtgatcttgggtcactgcaacttccacctcccgagttcaagaaattctcctgtctcagcttcctgaatagctaggactgcaggcacccgccaccacacctggctaatttttgtatttttagtagagacagggattcaccatattgatcaggctggtctcgaactcctgacctcagatgatccacccgcctcagcctcccaaagtgctgggattacaggcgtgagccatcgcacccagctttgggcagtgttcttaatgcctcaagtctgtttttcccactgtcaaggatataatacttatgagggttgcctgagactgcttggaaaccttgaacatacgggaactaccagaggcgctatagccttgagaattaaaaccgtaataaccctgagaggtcctacacagcgtcagtaccccgcagcaagactggtagaccagatctttgcatgcagttccttttcatgttcttttcagagaagacagaaaatctctgtagagtgtatcctaaagagttctctgtgttgtggaaaacacagctattgatcttgtgaaacggcaggttgtgtcagctggaaactgctgactagtacgttagagctgaggcttgacatacgctctccctcggtactagttagttgtctttgcagacctcccagctcaccctcactggcagccctctcagccctaagtggggtgtgaaagagaaaggactatcttttcaaaggttacaaattcctgctataccttggtaatttggtgtgaattaaagtgtgtagcttgatcttcatgatattcccgggtgttccaaaactgggatggtacctaatttctcaagttgaccctgccctgaaacccagttggagataaaacagtggcgacttggatctcctgatgaggaaagcaaatgacaatagctatgttgaagaatttcattccaggactctgtccccatgactgccacatctccttccttctcagtggcattctttatatgatggacgcgttcagtcacaacactcccttgctctggaggtaagagcatggttctagtgatttctctgaactactgggagccaaactctttgtagggtaatggggcctggaattctcttgtgttattcccaatatcaccctgtttccagattgaccaagttccagggtgcaggctagaacatctgaggcgtgcagaaaagacctgtgcagaacatccagcctttctcacagaagcaccagctcagtcctcttgcggtcatgtcacctgccaccttcccagtgcaaagttacaggttatagagagctgacacaaataacgagtaaaaggttactctgtgtgttgaagagtactctttttgttttcttgtttttgtttttttgagacatagtctcgctctgtcacccaggctggagtgcagtggccgtaatcttggcttaccgcaacttccacctcccgagttcaagcaattctcccgtctcagcttcctgagtagttgggactacaggcgcccgccaccacacctggctaatttttgtatttttagtagagacattgtggatgccagagatagagaatagagagaaccctgtggactcgtgggaggctctctgcctgaattagacataagggaagtgccagatcacattctggtggagaatctatgctcagggaaggtctggtttcttaaagcactatcacaggagagggcccctaaaagttagtgcccccagtcagatgtatcagtcaggaaagagccccaaggatgggtggacagtcagtaacctgcagctccatctgcctttccccaacccagggcttcccactttctcagaaccccagtgtctcatacctggcggcctcctccttcacttacggaactgtggactctggactctgatatatgtggaacctccatgtcttggcacactggtaccccagcacccccaaatgtgtagtgtctgtgtgtacagtgggcacaccagtattgagtcagctgtagcacagatcggcatggggatgctgtactaagagtccgacccagaaaatgagttagaatttttctcttaaattttccactccctccgccccttacccccaccctaccccctcatcattttataaaacatatgtagccatcgcctgtaagatagattggccacgcacggtggctcacacctgtaatcctagcactttgggtggctgaggcagcctgattgctggagcccaggagttcgagaccagcctgagcaatgtgacgaaacccagtgtctacaaaaatatataaaaattagctgagtgtggtggcacacctgtagttccagctactcaggaggctgaggtgggaggatcacttgagcctgggaggttgaggctgcagtgagccaagatcatgccattgcactcaagcctgggtgacagagtgagaccctgtctcagaaaaaaataaataaataaaaagttatcttaacttctcccggacaccccatgttttactaacagggtcttctctggagctacacaggtagcaaagtcagtgtttgctaattgcaaagcacaaatcatttatcccagaaaagaatgctaaagacattgtgctaggtcacgtgtccccaatatgcacctgccccagtatggcctcattcatggtagacaattgaaactctcaggaattcctccctgcccaaaagtagctagccctcatgtccgctgctatgcaggagggaggtatgtcctggtagtcatcaaatggtgtgcttgaaacacagtggcctgctggaaatggtggctcacacctgcctgtaatcccagcactttgggaggccaaggcaggaggaggaccctcatctctatgaaaaactcaaaaattatccaggcacggtggtgtgcatgtctagtcccagctacttgggagcctgaggtgggaggatcccttgagccttggaattcaaggtggcagtgagctatgatcacaccactgcacccagcctcggtgacagagtgaaatcctgtttctaaaaaacccaacaggccaggtgcggtggctcacacttgtaatcccagcactttgggaggccgaggtgggcagatcacctgaagtcaggagttcaagaccagcctggccaagatggcaaaaccatgtctctactaaaaattcaaaaattagccggccgtggtggtggacatctgtaatcccagctacttagggggctgaggcaggagaatcgcttgaacgggggcaggtcggggcagggcggcaactccctcttaaaaaaaaaaaaaaaaacctacaccacacaaacaaaaacacaatggctcaaggaggagcagctggtcagggaacctcatgggatatacagctcccaaagaaaaaagaagtcacacaaaaaagaattcacttcttaaaattctgtagagatgaagaacccactgagaccacagtcagattctgaaaaaagcaatggcacatgccatagagacctccagagatcaggacaagtttgcagtggggcagtcataaaaacatccgtccggttcctggagccaatgttaagaccattcagagacatcttggctgggcaggttccttgggcacggcacaagggcattgcagcacccaggtccatggagatcacaaaggattcttccagcatgagtgggcacagaagattccccaggatgcagggaagtgacagtctgtctgttcagctcacttactgagtacctgtcctgtgccaggtaccatccagttaccagggtgcaatggctatagctgacccttgagaaattagcaatttaaggtggggacagacacatagatggctaattgtaattcagtatggtgagtactcttaacagagaattgttttttaaaatcctactggctcaaaaatcagaaaaatatcatttctgcccaaagagatgtcagggaagaatatggagaggaggaagacctggaaggctgagttaggaaggaaagaattataactagatttgaatgtggtcaaaaataggacgtttatttccaggccccttatgtgaggtgtggtttgagcaggagcttgagattccagtggcagggtcccctcaggctattgggaacatttatttttccttgaaacatgaagcctcctaggaggcctgcgtgtgctgtttggtggatacgtgaccatggagcttgggaggccgcaggtttttctgcacccagcctcactgagctgttttctctgtctgtttccccagctcggagtccagtgttttcccacttgtcatcttctctccaggggctctggaccatccgggcatacaaagcagaagagaggtgtcaggaactgtttgatgcacaccaggatttacattcaggtctgtctatttctggaaatggtttcaaaggacaggatctgctgctttttctggcttaacctccctggtcagatgagcttgttggcaggcacctcagggcccagccccacatcctgctttttttgcgcatcttcgtctccttccccatccccttcttctgggcttggactcctctcggaatcgctgctgcacgttccctctttgtgccccctgactggcttgtggggtctttctctcaccatgcatggcctgtggctctgtcagcaaacgttttctgcaaaaggccacctagtaagtgttttaggcattgtgtgccattattgtctctgttgtgatgaatcacctttgccattgtagcacaaaagcagatgtcaatacattggcaaatggctgtgactatgtttcaataaaactttatttacaaaaataggtgctggctcacgtgctgtagtttgctgaccccttgcatcagtgaagattttttcaatatggaaatttcagaatttccaccaaatctacaaaattcagatccgtcattccaatctttattttatcttgctgattaaatggcactttaaaaaccacatgctaaaaggaaaaaagaagtagcaaacaaacaaacaaaaaaccacatgcaaatcctgttagtgaggtcatttttatatagcccctaagcaatagtcagtgtgtgtgggccttctggtaagtatggaaggtgggagaagtaaattgggagctgcactctgctgttggagaactggaccagtcaaccatgtgtgtgggtggacttcacatgagatgcacttcacataagtatttctcagcactgtacgagatgtccttatgagactacttttctcagttctttattaggatcatatttctgggtttcatattcgcatgcatcctcacagaaagccacggtaccattgtgtatgtgtatcgtatattgcctgtatcacttagctttctggaatctaaaggttccttgggtgtgcaactttggtgccctactccacgtaaaaatcttctgtagctcaactgagcaaaacacactcgcacattcatctacttattcatcatgcttattaccgttctcaaattcagaggcttggttcttgtttttgacaacgtcccgctggttcgccgtccgtctggatgccatctgtgccatgtttgtcatcatcgttgcctttgggtccctgattctggcaaaaagtaagtacagatgtgaataactatgtatggtatgattacaatttatagctgtgtttacatttattaaactcttgccaccttgtctactactacatactgtttggtcctaatgaagtgtattaaatcatttacgatgtgtcaggttgggtaggattcagcagtgtgactcatttaaggagtcatttgggtcttgatgggtttatctttctttgaatgggttgagatatgcgcagttgagattctgaacattcctgttagtgtctggtagttgtgaagagaaaaccaatttattctgaagcattttgtccaacttagggtgttagccttccaactacttgaatctattgtttgtagttgcctggtgcatgaggttgagaaaaattctcagcaggagagtattatcttcaatgccacatgggtaccagacaagcagggcatgagttcaccaccccagtaacaacagtgcattacaatacttaataatggaacaaggagagtagtattttagtctcaaaagcattggcacttacaacctattgctttgtttttagtggtttccagctgtggttgcattgcacgtagaaagtggaataatgtaatgggctttgaaaccataataatgaatgtctgaataatgacattatttcttgcgtttgtaatactgttaattaaatctatgtcgatcctgttggaattcataaaatcatctaaaaatttttctaaatatacagtgttgttttccccattgtatcttgatctcaagcaacaaatggtaaaagtatagctattaatgtcattaaatgtgaattgtttcaacattatgaagggttcctcttggtaagtggcagaaggagccaggcttaggtttgaagtgagactgactttattcccttcttcctccttacgtagctctggatgccgggcaggttggtttggcactgtcctatgccctcacgctcatggggatgtttcagtggtgtgttcgacaaagtgctgaagttgagaatatggtaatatttaccttcacgttctttgccttttcaatctccttgccattaaatggtataaaagccattcttatgtgaaatattaaaactgttatttttacatctttggtaacagattttttttaagatccttcctccatctgtttaaagttaatgtaaaataaaatatatacatctttttctgagtcttatggttgctctgtcagcaggttttatattcatcacaagctttttcagatgtaataaatgtctctgtaggagggaggttctgaaattctagagaggatataagctaatttcttagaagcctgtttaattttgtttcttaacgggtaattcctcattcctgttaaaagaagacttcagtattttgaggttgtttacatttaattaataggtctcctcctctcccagttctagcgtttactctcttatgtgaagaacagaagggaggaaggccttaactttgctggtgtgccttcttggtacagaaagcctcctcttggaatgtgctagtcaaagggtattagtttatggtggtataggaggctttaatcaatgttttaaatatttgcaccttcccctaaagagagaaaagcaataaacataaaaatcttttcattcttctcatagagcaaaagttgagtaattattacagtgaggtttcacgatcatccagtttaactgacctatatcaggtgatccttctatagcaaaagattcttttttggggggtaggggtgaggggacagagttttgctcttgtaccccaggctggagtgcaatagtgcgatcttggctcactgcaacctccacctcccgggttcaagcgattttcctgcctcagcctcctgagtagctgggattacaggcatgcagcaccacgcccggctaatttttgtatttttagtagaaatggggtttcaccatgttgaccaggctggtgtcaaacacctgaccttaggtgatccacctgccccggcctcccaaagtgctgggattataggcatgagccaccgcgcccagccagcaaaagattcttgattggtggctctaagtattcctttcctttacaaaattttcttgcctttaatacagatgtgagaagtggataaataaaatctaagcattcatttctctcattcttttaacctaatgttgaaggaagtggttgtaagtgaaggtgttacacaatgatgaaccaaatttgtaagtcatcaacatcctcgtctgtctcctgcttctctccttaaccaactatgtatgaaagaagaacatttcattgacagtctcttaacatccataaatgacaccctccattcctaacccctcgggatgtcatatttctttcagatgatctcagtagaaagggtcattgaatacacagaccttgaaaaagaagcaccttgggaatatcagaaacgcccaccaccagcctggccccatgaaggagtgataatctttgacaatgtgaacttcatgtacagtccaggtgggcctctggtactgaagcatctgacagcactcattaaatcacaagaaaaggtttgtttaaagcatcttgcctcttctcaatttcagaagatttagtgctatgtctgcttgttgtcttccttgtggatgtgtgaaggggatcagtgatacgtaggttaacctgtcttggaaactaaccgtggaatgtggataccaacattcttcctgctgtgaactgctttactgtggttggtgggccccgggcctcagggctggagcttaacgtgacccaggatactctgtttgatacctaattactcatggatttttccaggaagtcaactctggctttgtgtcaccaacactcctatgtctaattctgtcgatttttactttgttgcatttctcaagtccttctcttcccctccattgctgcagcttctgttccagcctttctcctcctccatcctttggtcctgtattagtctgttttcacactgctgataaaggtatacccaagactaggcaatttacagaagaaagagaggtttaatggacttaaagttccacatggatggggaggcctcagactcatgatggcaggcaaggaggagcaagtcacatcttatatggatggcagcaggcaaagagagagtttgtgcagggaaacttccccttataaaaccatcagatctcatgatacttattcactatcatgagaacaccacaggaaagacctgcccccatgattcaattacctcccaccgggtccctcccacaacatgtgggaatttaagatgagatttgggtggggacacagccaaacattatcaggccctttccttagtctttcttgccttcctttaacctgtgctttgctttccctccccatccctttcactgcaaactctttctttctgaaacagtttgatcacagatctgatccttacgtggccagctccttgcctgggtgagcagctgctgcaaccttaatgagccccaggcccaccctgacaggacctgtctggctctcagcccccaagggaagacccagatcccatgaccccatcagtgctcagaaatcagacccccaagctggaggcagtaaaggcaccagagactcactcaaagtcagtgaaaggaaaacaaggagggacttgggaggctgtgtggagttttgtgagctggttttgcaggtatctaagtctgccagcaatgtccctttcacatgtgtcctggggcccttggctaggactaggacagcctcttgaaggaactaaaccagaacaaacaagacagtagaatctcttccccttcccacccctctcctcacaactcccaatatggacacacatcccctgcactcagggtgccctccttctccccaagcacctgtctgccttgctcttagtgtgcacccttttcagtcagttcaagcatctctgcctctttgaaactatattctccacatcatcttatagattcttttttcgagacagagtcttgctctgtcgcccaggctggagtgcaatgtcacattcccggcacactgcaacctccacctcccaggttcaagcgattttcctgcttcaacctcccccgtagctgggattataggtgtgcaccaccatacccaactcatttttgaatttttagtagagaccaggttttgccatgttggccatggctggtctcgaactcctgagctaaagtgatccgcccaccttaacctcccaaatcatgcctgggattacaggcatgagccaccatgcctggccagattctttaatgtaacatctgtggcccacccgtgttcataacagcattatttgcagtgagcagtaggtggaagcagcccaagtgtccattgactgaggaatggaaaaacaaaatgtgatacgcacgcataatggaatattatccagacttaaaaagaaggtgattctgacacatgctgacatgtgtgattctgacatggatgagccctgaggacattatgctgagtgaattaggccagacacctaaggacggtgctataaggttccacttacatgtgggtacctggagtagttagtcatggagacagaaagtaggatggtgggcggcaggggtaggggaatgggcattagtgtttaatgggtacagagtttcagttttacaagataaatggagttttagagatggatgatggtgacggttgcccaacaacatgaatgtatttaatataattgaactgaacattttcaagtgattacaatgatcaattttatgttactttaccacaatttgaaaagtacataaagtaccttttgtgtattttaccacaatttttttttaaagaagatagcacgatggcatgatttataattctgggtcagcatctcacagtaccctgagcctcttaaagtcagggagcattttatattcgtctctgtacccccagaaaatggcatgctgcagggcacatggtgggtgcctgtgagagtgagggatatgcacatacaaagaaatcggtaacaaaacacacacgacagctcccgcaacagcccgttctctgggtgtcagtgttagatactttcggaactgctcttttcagctcttcccaccacagacccatttaatgggctatagtcacaattgaatgaatgatacccttgtgccatgaaaaataaatatacagcttcatgcccagaagatacccagggaaccagcaaaagctgattcctcattatctacccagcatccttgtgagtgtgaagaaggtggagaccactctgcaggcagcatcagctgtagctcttgctgaaagcaaggtttctcagattctgttcctgatggggccagggggatgtttgcttactctcagacaatgtgttattaggtcctacctgatcaacatcattctgttagtttggccacgttgtaaatttctcttgtagccataaaatatgaattatctacaaacctctgttgtacacattagaaaacaacctatatccccacattgatatcgttccatcttaaaacccccccaaatcataggattacctgagatctgaaatgtgggagggtaaattgaatttgaagactgaattatagctacaaccacttggcttttgagacagagtctcgctgtgtcatctaggctggagtgcagtggcgcaatcttggctcattctgcctcccaggttcaagcgattctcctgcctcagcctcccgagtagctgcgattacaggcacccgctgccatgcctggctaatttttgtatttttagtggatccggggtttcaccatgttggtcaggctggtcttgaaccccgacctcaagcaatccacctgcctcgacctcccaaagtgctgggattacaggcatgagccactgcgctgagccccacttggcttttgatttgtgtcctggttcactcacagtgtcacctttagcttcatttgtgtattcaggcaacatcgtggtgagttggttccactttttgtgtgtatattcagggttcgtctcctccacacctgcctgcagccccaggatctcaggcagtccctttgctgttggagctgatggagaggggcattgtttccagtggagatgtaggaatgtgtccacacagcagaaacagggcttcattctctttcaattgcttcatctgctcagatttcctggacattataacaaataggaaaaagtaataggcgctaagtaggtttctaattcacagaagaaatagcaagtaaaaaagaatgaaccaaaatgaggtatataccaccctagccttcctggttagattccaaacactggctgcatttttcatttagatggttttgtggttgatttaatcattttagagagtactgggccattttaaagcatttttcagctctagaggtagattgattttggtttgttatttttttttccttgctcaaagctattacttggataatacctttttacagatgtgtactagaccttgctatagtgtgcaaaaatattagtttcttatattctctccttttttacattaatgtttgctgagaaacccctcctctcacagccagattgtcccacttgccctgcctgcttgctcatctcaggggctgggatcagcatcacctgcctctgcttggaaacatgttagaaatgcagactgtcaggcccaccccacccttttgattaaaattgcactgggacaagaaccacccccactcctgcccctgcattaaagccgttgctctccggtaagcaattttggatgactaataatctgtgatttccaagaaacttcctttgacaacttgaagtggagctcgtggattgccccagcccctcttgtgactaaacatgagactctggatagtcctgggccaagtgccaccctacaggttttttgtttttttacttttatattctgcaaattatgaatttacattacaatttaattctgtgtgattccccatttatgcattcatttgcacctttccggtcatctctgtcttctatcacagttttcatcccaccatacagccttccatgaatagcagtctctgtcctcataccagctcagcacagcgatgtatttgagttccgttcactactgatgggatcaaaatgggtctcactgccccacagtacactaggtctgtctggcctgtttcccagttgccccatgtccaacgtagctgcaggcttctctcccagcctcttctgtgggtgccagttcttcctgtcaacagctgtaatccaccctaatacaggtactgtcttggctcacagtagtcagcttcttgtcctagccaccttcttatactcacgcatgtccacagcatgcattaaatgtatgacaataggaccagtatggcaggccagtgcctttaaagacaaccacacttctccccgctgtctcccttctagctacaccaagggaatacagagccaggctatccaagtgattgggaggccatcggcagaatgggcaagaggcaggcagacttgggtttcagtcccattccatcacttaggggctcagtcatttcaacagtttaatcaatcttactaagcctcgatttttctcttttgcaaaatgcaagtgatagggcctagccattagagttttataacttaaacaagataagaggtgtaaaacacctagcttattgtatacctgaacaatatggcaatagatttcccataaatgtttcaagcctgagttaaatgcttaactctctgggggatttctggttttttttgcaggacaccacaggtgatacaaataatacaaagctaattccaatataggccctgcccacagcacctatcgcctagtagaagaaacaaagtagtatataaatgcctgctccgtaagatagaaggaattcgcagattttatggctgtttagaaaagatgttacgacagccattaagtgtgggagaaatccacacgaggggacaagtggaggattttaaggcaattacacatttgaaacagactttggaaggtggttaggatttcagcaggtcgaaatgcatgtgaaaggcacgatggcatatgccaaggctcgatgccgtgatttgatatgaagaattaggcatctctgagcatacaagggcatgaactaccaggtgaataacacacatgtgcacacttagtcctcacagccaccccgcaaactcaatcctgctcatggagctaaggatggaaaggttagttgggactgttttgtagaggaggtttcccagtgtggagtgccaggcagagagctgtacttcggaagtttaatctgagaaatgagtgcacggggaagacgctgaaggcctgaagccaattgattttatgtactgctggcaagatgtgatggggcaagtgattccactttgtagaatcaaactaatgttgattaaaacaaagttataataccctggttagtgaatttgcagggatacaggtgggagtagaaattggtatcatatttctggagggtagtttggcatcacttaacagcctcctttgaaaatgttcatacctgttcctcagcaattccacatctaagaatttattttaagaaaccaattaaggttgcttgcaaagatgtagcttcaaggatatttaacatggtattatttacaatagcaaaatattggagcctaaacatccacaaataggggatttgttgaataaataatcatatatactgtaatattatgtagctactgaagtaaatacttttattaaataatagattataatattctgtgcatattctcattttgcctaaatatatgagattatatctttaggaacacagataactcacactcaagttcagaaagaaaaggtattaacatgtgacaaggattctgtcagattgctggggttgtggccagcatttatttatttttcgaattcacttgcactgattataactagcaaaagagtttttgtttttcaaatgttaatgcagccttgcactgaggtaatggctgcagaaattaaagtgagggtattgagtcaagaaacagaacaagtaatatttttagtgcttggagttgagaaaacctgggagatgggtgttttgagcctgtgaacttggggaagaatttattagattaaaatggaggagttagaagcagcagctgtttggaggggggctgttgggtattaatcatgttgagtttcatatatgaagagagatccaagtacaaatgtctaatgtttggccaaagagaccactcttggcccagttggggaaacaaaaagggtcaattgtaaagcaattaaaataaaactaagtgtctctttcgtgttatgaatgtaaacttactgatattagtgatattctccagaggatttggtgaaacccattggtgacttatgaaagacttggagactgtaattttgatgactttgaagagaactaaccagagccaggttttctttggttgccttttgctgattatatcctcacctgagtttggagtgcctagtcttatggttgtaggcagccctcagtgttccctacctttgagggggtccatcctggccatctactaataatggcctacaaatgtccaggtttgcacagatggatcagtttcccatagagctgataacatgagtgtccacacattctcaaaaacacagcatttgtctatgtctagatacgtgctgatttactgagaaacacacataagccccacacacacacacacacacatacacacatacacgtgtgtgtgtgtgtatgtgtgtgagagagacaaaatatagtcaggtatttaatatttggaagtttctctaccaaagaatgtgtcatcttaaatgatagaagtctggaaaaatgaatacctgtttatgtcacttgtgacacctctgtcttgaattaatatccctgtgaaattatctcagaaattcaattggtgtgtgtgtgtgtatatatatatatatatatatatatatatatatatatacacacacacacacacccggatgtacctatgtgcagaaaatggcccacctataaagtataaactaggatttaccataaggtagaatatgactccaaagttaataaaattagctaaagccactttttaaacatttacatttttatattttgtacatgtatctctttaaagataaaattccttgtggaaatgccattattgactttacagatatggaggtgttcaaatgaggtaatatgtcacatttccaacacatacccagtgcccagtaaagttttgcagtgagttttaaaatttattaaataatggacaaatgattgaaggcatgttttatgtccttcgttgactccagatttctaaataaggaggatgtcatttcttgggaagttcccaccaggaaatttgcagttgtgcaaggtcattggtgcagaggccagtttctgcatacagatttatatgcacacatgtgaaagccagtttttacaatatagacgtattgcccccacctttttaccagcattttattgattctttgatcgtattggcagtgcacttcatttctctctgtcttggctttaatagaggagtgatacttgacacaaatgtttctcaaggggcaattgtaagtattaattagtttgcagcatgccttttgaactgtgcagatgaaaggccttacgtaaatagcaaatgttacttgcgttgttgttgatctcattatgtgttttttggctactggttactactgtcttttaagacattgcaatcttcacttcagaattttgaaacattttgagacaaaatataggcagatatttaatatttggaagtttctctaccaaagaatatgttatcttaaataatagaactctagaaaaatgaatactcgtttatgtcacttctgacacctctgtcttgaattaatatccctgtgaaattatctcagaaattcagattactcagatcctgcaagcaaagctaatttaaaagttgccttttcatgggccacttaggagactgttgacttttcaatgccagtaaacagattctgttattttcaactcttttttagaacagtggatctcaaccaggggcagttttgccccagaggacgtttgtcagtgacatttttggtggtatcattttgggagtgtgctcctggtatctatgcagtagggtccagggatgctagcgaacctcccacaatgcctggggcagcttccaaaatgaagaagtatccagctcagaaggtcatcagtgctgaggttgggaaactcttagactacactcaatatagaatgtccttaattcttcttcaaaaaccgaaagttttctcctagttttgctgcatcctgtgatttttttttttttttaatcctgccgcctggatctctctgtaggttggcattgtgggaagaaccggagctggaaaaagttccctcatctcagccctttttagattgtcagaacccgaaggtaaaatttggattgataagatcttgacaactgaaattggacttcacgatttaaggaagaagatgtcaatcatacctcaggtatgcaagtcatagcgtccttacctgccccttttataagagctactatgtttaattgcttttactcttattgctttttttaattggatgaaaggattgttttttttttcacccaatagagcatgtttttatgagcagatattttcaacaggtattttcatcagatatccagctttgttcatttctctctctctctgtgtgtgtgtgtgtgtgtgtgtgtgatatttaataacttacgcagatagatttctgtactaagatgccacagttttatccactgataaccataaagaacaaaatgatgcattgtttgtttagcactggggaggtttctatggggagatgtggattttaagtgtcttaatgttggaattttgctgtaggaactaaagctaccttctcaaaggtgattacctccatgaagggctttctgtgaaactgtgggctgtgagagttaaaaaacttatagttggctttgtggtgacttttagaatctagctcttggtgaatgattttaaccaggaggttgttaaagaatagcaaggaagaacatgagagacggaattccatctctctgcacttctgcttcatcttccttacgatcaccattgtgagagtgtgtggtgtatttcacacagacccagtgagtgtttgctctgatggtggagggttaaattggccatcctttcccggactctgattctattttcttttcttctcctttgcagaagtgactctcaaggagtgttctagagattggattatttgtacaataagagctcctgtcattgctttggttcatatttaacataaattcagaaagtattcattgagtaattactattctccaggtgtatagtcatgagcaacatagaccttgtccccaccggcatggggtctgcagctgtggggcctcatggcttccatcggacctcacagttccatcctgtccttcactttaacacctccacatattcaactccagacatggctgggttttttgtttgttttcttttaatgtgggttttttttttttttaacactctatagtcattgaggggagctgaggaacacacacacacacacacacacacacacacacacacacacacaaacacatattctggagaagagaaacacagagaggagacaagagcaaaacccaggcagtaatgagctttctgggcatgtggatataaacaactcttcaatgcctgtttagtaggaagcatagagaacgtgccaccggaagggaaggagaatgtgatttttatcttagaccaagtacagttatggctatcctagcactgacctctaaaacaattggaatcacgcttaagtaatttggaggatgtgaagaaattggaaccctgtgcactgttggtgggaatgtaaaatggtgcagccactttggaaaacactgtagagattcctcaaaaaatgagagctaacgtgatccagcagttccacttccagaaagaattaaaagcgggatctcagagttttgtacatccatgatcatcacagtacccaaaaggtggaaatagctcgtgtccatcgccagatgagcggatgaataaaacgtggtctatccatacaatgggaaattattcagctttaaaatggaaggaaatcctgacagtctataatgcagatataccctaaagacattatgctaagtgaaataagccagtcacaaaaggacagacactagatggttcccctaatatgagatacctagactagtcaaattcacagagacacaaaggagaagcgtcgtcaccaggggctgagggaaggtggggggttgggagttacattatttcacataggacttcagttttgtcagatgaaaagcgtcttgtgaatggatggtggtgatggctgcaaaacaatgtgaatgtccttaagaccactgaaatgttgactttgaaatggcaaaagcagtaaattttatgctatgtgtattgtaccacaatttttatttttagtttaaagaaaaaaaagtatccctttcaggataaaatgggaagaaatgtttagcacgttagattccctctggctattagaagcatgacttagtgcttacagtagaaaatgagagtataaattctcaagttttatattttggttatgcccatctcaaaaatgggccaaatgaggtttacttagcagagataatgggcatgtctgtaaagtgcttttatatccttggatgaaaggttctaggaacgtgccctgcattactttgaatgaattcttaataagaaatagttgtgtgcttgtgtacataaaagaactctaaataaagaagtaacattagatgattcttggctctgccagtaatgttttggaagcacatctgagcaaagactaaatataccttgacatcaccaggttttggttcagttccataagtttccaccctacttttgagcaaatgctctatgtatgtagtccagggagcatgcttacaaaacactgctaagctttgtatccatgtagatcctgatctccaagcattgtaaacagagagactttcctttttaactttgtatggctttgtctccaaggctcaatgttggttgaaaaaaagaaacatagtctagagggactgtgcaatacttaatgcgacccaggaaatcattcagcagactgcctgggatagaatctttcagagcatcttctaagcgtcaacacgacccacatttttattccagcactgcctgatagaagtgtgacctcaatgaagtcacttagcctccaagcttcagtttcctcatccttaaaccaaacctagtaattactaacttacagatttgttgtgaagattttactagatgagaacatgtttgtggccctactctgggttctgaggaatgctcaatagtaactatttctaattaaggattggggtgcaggcctttagggcattattgctactcgctattctagaaggacttggctcattaacttctgtttctatttttgtgatccttggtgaattcctttaaccaaattgtttatgtaaatttaaatagtgaagcagcaacaaacaaaaaaaaatgtgcacaataaaagcctaagagagaaatctaatgtttttctcacaaggaacaaaaggtgaggctatcactttgttttctggctttcccccaccccggtcttagcggcattcctcaccactctcagtacccctctaatgctttgcatttcgcgagcaggcagccgacactggttctcagccctgcgtgagaacaggggcttgtccctcttagatccagtgctttagtgattgttgcgtcccagacaagttacacaagtagtgagaattcctaacatttgcagaatccttaacatggttatcttctttccttgccatctcccacttcgtcctcacagcaattctgtgtcatcctcatttgacacattttcaaactgaggcacagagagcttaacccacttaacaagtaaacagcagagtcaggattcaaatggaatttacggcgaatctcaatgccagatcctgagttcctgaaccctctcctagggactttaaacccatgttggctggcgcagtccccgatcagaactctgctttgcaacatgatttagtgtgggctcgtgcaggtgcacacacacgcacagaaacaaaagtctcacaacacgatattactccatgcttctgcgccctgatattttctattatatccattctattctggttcatataaaagacataaggatggtcatgagtcacaaaagtgatttcatgatccattggttgcacctgccatttgaagaacagcgtgcctcactgtgctgccctgcttggccgggctcctgctgcctggcagcaccgtgcaaggagcctcatgacacagtgattgtcactgcagccctgcagggtgtgtcaagttagccccattctccaggaaggaaactaaggctcagggagattaataacttacctggagatgaacagctaataagtagtagaatcagaactcagaactatccaactcaattttttttcagtaagtatttgttggacagcatgatatctcatcagacattttactcattgtttttcttttctttttctttttcttttctttttttttttttttttttttttttgagacggagtcttgctctgttgccaggctggactgcagtgacgccatctcagctcactgcaatatctgcctcctgggttcaagcgattctcctgcctctgcctcccgagtagctgggattacaggtgcgtgccaccacacccagctaatctttgtatttttagtagagacagagtttcaccatgttggccaggatggtctcgatctcctgaccttgtgatccgcctgcctcagcctcccaaagtactgtttgtttttctgtctacccaacttacaaaaggttcccagaagccataaccaaagagagcaaatatacagcaaagtcaaaaggtatcttttctttgaactttatctgtcatttggacagttaggtcattttgaaagactgaatcatttgtgatttatttttatttttatttttattttttccaaaaccttaagtgacactaagcactaaaagaaaatcattttggaaacagagtgtattcacttatgtgtcgtgggctagtgagcgtcagaagatcctccaagccttaccttgtgggagctcagagccctttttcttccgaggcctcgctggctgcagagggtggagaaggctggagacttgaggttgcatgaaggttactggtctgcagtgcagaaagcatacacccctcttcctcagaagtgagtggaaagccaaatggcttgtgtcaccacacactgatgtagggaatctaggaagtttgggagcaaacacagcaaaagcagaaccaagcgctgtttcttcgaatggccatgtttgggcaagtctagcctgcatggcttcctggggttgtgtggagcacgagtttctgtgttctctctcttcctggcttatccctttcatttatggttcagggtcctctgtcactcttgaccacaccattagcaactcaaattcgtggttaggattaagcagcaaggacctgggaaagaactggggcacagaaatgatgacatacatagtcaggggccagtcctggagtcactttaagaaacaaatactgggccgggcacggtggctcacgcctgtaatcccagcactttgggaggccaaggagggtggatcacgaggtcaagagatcaagaccattatggccaacatggtaaaaccccgtctctactaaaaatacaaaaattagccggacgtggtggtgcgcatctgtagtcccagctgctcgggaggccgaagcaggagaatcgcttgaaccccagaggcagaggttgccatgagctgagattgtgccactgcactccagcctggcgacagagggagactctgtctcaaaaaaaaaaaatactgaattcttaagaaagtacccctcaatttgtattcaaaatttcaggaagaagcgaacagtgaaagtacttcctaaataatttccctaaacagaatagttagctgaaatgtatgcttcttttgtgttcatgacacagggtagttaagtgcacttcccaaggagaacaccaaggtgatactataactcagacaagagtttgcttaactgaaggatctggaaaaatggatttcaaaactttttttaggatggattatttactcctccaatcctactggcacaaataaatgttttcaactaaagagtaacttcatgcaaattcaacatttatgatagcaccctaacggttggcatacatcaacagctataatctttgttaggattaaacagattcatttttcatatttgatggacttttttgtttttctatcaaagcaaaagctaagtagtttttaagcagcccactgctcagacttctgctatcttggtatttctactccctgaattttcttcagtaagttgaaaaggttaaccagagtgtgtctctttaagacttctttttttattacctgattttctttcctttttttttttttttcttctttttgagaacaaaattcaaagggaaaagaggtaggtatgcagttactagtaaagaaatacaattggattctggcctaatgcagtcagtcctttgtttctgcacactgaagtcttcattaaggccatggaactgctccctggagctggtgacctttttgtatctaaagaagactttacacgacttaaattctttttcctttgttggtgaacaatgttcttttcttctgaaaatggatgatgatcagttcattcagaggctacagggtttttttaaaaaagaagggaaaccaagatttaaagtgacttcaggtgattccctgattcttgacacagggagatgagctgccctgaatcaaggtcttcaggatttgaaatgcacacatagctctgaggacatcaggcagcagcagttgtggctagctactgtgcagtgtatattttaagagagcgaagtttcctggtttgggacaagattagggtaaagtattgtgctttgtcctgctggtttgtaactccccatgcgatttttgtcttggtcccaggtcgttttaagtgtctgaaggttggtggatagagtttcttcttgagataatgagaggcttgtcttccagaagtttatatgaaagctctaggaagactgtaattttcagtcttgcagtcctgctgagggattatcaatttactgcactaaatgctttgattcagagcggccatttttaggtcacgtggtgggttttttttttgctgttgttgctgttgttttgagacagtcttgctctgtctcccaggctgcagtgcagtggtgctatcttggctcacttcaacctccacctcctgggttcaagtgattctcctgtctcagcctcccgagtagctggaattacaggcgcaccccaccctgcctggctactttttgtatttttagtagagatgggatttcaccatgttggccaggctggtcttgaacttctgaccaccagtgaaccacctgcctcggcctcccaaagtgctgggattacaggcatgagccaccacacccagcctggtcacatgtttaatatcagcttgtcttatgtgagtaatgaggacaaaattactactcagtatggcgcaaagatttttaaaaagtatgacctttaaaccctaatgaaaaacaggtttgatctggtgcttcatttaaaataatacgttgaacagaacattggttttgctaacaatggaggttaaaactcgtactaaatgacattttaaaatatataccatcaataaatatgtacttaggctactaaatcttttacattttacatgaagattgtatgtttaccataaatctctactctgaaatgttctgcctgcagaggttggaattttagagttgataattacaaagagtaagtcaagtttttatcttttaatctgaaataaccagaatgatggttattcccctcacaagaaattcccaccattgtttagatggttgttcaggttttggtcttcagttgggtacttttaagacagaccttacctgtgactcttggaatttttcagttccatttggtaattcagaaacatcatgtgaccagtgacttttcagtgcttttggaaggatattggccactttatcagctttatacacacaaagtgcccattttaccgtcgtttccatttttgcattttgctgaggacttatgtttttggtggcaccctgtctgccttctacatccatttcttcctcaccagccttaaaacggagacgatagggaaagggatgagagcctccctgggtatcatttttctttatggctggagaaaaaagaagtctaccacctttatctctcttctcaggcttttgggaagtgaggaggaacagtcctgccccaaagccaggtgagatttgaggccagtggttcccttgagcatttctccagtacctgtggaagagtctcaccttctcttgttcccacatctgtgcatccccttgttctgcccctatccttgaaagcagttgatggggctcctatatccttatggcctggcttattagagccttccagaagaaaagtttgtgtttttgtttttttgttgtttttttttttaagatggagacttgctctgtggcccaggctggagtgcagtgacggaatcttggctcactgcaacctctgcctcccaggtccaagtgattctcctgcctcagcctcccaagtagctgggactacaggtgcccgccaccgcacccagctaccagaagaaaactttcacacagcctacctaagcttatgttcaagagtctctcttgaaatccaggaagaggctgatattccaagagtgatttaattgtgggatcctcctgaagcagatgaataggaacagctatttaaattgatgtaattttattatgacctccttcacagtggttttcaggtaaccctgctttcttagttaataatgaggttctgtgacccaggtaaccttgatgcacagatgagataatgtggggattcactgatgcaaaatcagaggcaatcctttcataagtagaggtgcctctggccccagttgtttagatctcctttggccaaaaaaaaaaaaaaaaaaaaaaaaaaaaaaaaggatgtcccattctgacattggagagatttttttttttttttttgagatggagttttgctcttgttgcccaggctggagtgcaatggcacgatctcggctcactgcaacctccacctcctggattcaagcgattctcttgcctcagcctcctaagtagctgggattacaggcatgtgccaccatgcccagctaatttttgtatttttagtagagacagggtttcactatgttggtcgggctggtctagaactcctgacctcaggtgatccacccgcctcgacctcccaaaatactaagattacatgcgtgagccactgcgcccggtgagagattcttaatcttggaaaactgttttgccaacggagaaaataatcctaatttattctttagtgcaaattggaaaatgcttaataatttggctttgaagcacaaactttaatcatgctgtcggtattttccagtattacatgattgatagttaatttctatagctctattcatgtagaccctcgaataattatatccttatatttcatgttaagctaataatatgaggaaaacagttttaaacatcaggcctgtatttttcattttcttcttaagatagcacattgcaacagttttgttagtgttcagtggtctggaaggtattttggagcacgctttgtacagtggaacattaatagatatgttgttttgtaaacaggcatttgtaacgctataattattatcatgaattttattttttggtatcttaattctattgttgatgttagcattggaataaaatgaaaaaagagtctgtggtaatgaccgtgactattttgggcacttaggaacctgttttgttcactggaacaatgaggaaaaacctggatccctttaatgagcacacggatgaggaactgtggaatgccttacaagaggtaattgataaaatgtaattatctttagtctgttagcctcagtatgtgtatatgtacctttacagcattgcaggaaattaagaggagcttagcggtttaactaactttgttcaccacccaggagatcattgaggatgtggatatgctataatgtgtatactgatgatgatgaaaaccaaaaataaaatttccctggttctcattttaattttcttcctgttgtccaaaacagtttggtgttgttttatttgtctttagcaatgcgttaaactagaagttgtatttatgagttgagatcctattagtgactaagttactctgcaccatttattttactgctctgttcttagggaatttctagtaagggaagaccatagtcgtttttcattaactaaaagatagatcatatttatgaaatgctttaagttttataagaaagtgtttataaaggtaaattatacagttggaatgggataataattatttattggcaaacgtgtaattttaatgcagataacagaaccctgcagcctctgctaaggttttatactaatatgttgatttctagaggatttttctattatttatgtggttcctgttgggccacttcttgaaattttctcacccttgcatgaaaaaaggactttgactattaaggtgctgttggtttgtgtattttaacactgattttctgtgttcagtctagttctgcaaatttgtgccagtctacttgatggcagaaaccatatcataaaactggtaatccctcacaggacctagtttagtcttttgcttttaaaaagtaagcatttaaggctgggtgcagcggttgatgcctgtaatcccagcactttggaagtctgaggtgggtgaatcactggaggtcagaagtttgagaccagcctgaccaacatggtgaaaccccatttctactaaaaatacagagattagctgggtatggtggtgtgcgcctgtagtcccagctactcaggaggctgagacaagagaattgcttgaacctgggaggccaaggttgcagtgagccgagatcgtgccactgcactcccatctgggcgacagagcaagactccgtctcaaaataaataaataaataaataaaaataaaaattggccaggcccggtggctcatgcctgtaatcccagcactttgggaggctgaggcggatggatcacgaggtcaggagttccagaccagcctggccaacttggtgaaaccctgtgtctactaaaaataccaaaattagccagacgtggtggtgcgcatctgtagccccagctactcaggaggctgaggcaggagaattgcttgaacctgggaggcggaggttgtggtgagccaacattgtgccactgcactccagcctaggcaacaagagtgaaactccatcccaaaataaataataaatattaaaagttaaaaaaaagtaagcatttaataagtatgtattaatatgtttgatctcttcatttcaaagaagtgtggagcctggacaacatggtggactttgtctctactaaaaataaaaaaaaaaaaagaattagccagatgtggtggcatgcacctgtagtcccagctactcagggagttgaggtgggaggatcttgtgagccctggaggtcgaggctgcagtgagccatgattgcaccactgcactccagcctgagtgacagagattaatttccctccattgttattgttgttgttttgaattggtgcatttgtcattgttgcccttccagggatagctctgaaatctttaatttatagatgggttttgactgtgagcaagtagacttggaggcctgacagtttcctgccagtaattcttgtttctgaaggcatgtcattgccgagtccttacacacccaccctgctttccagcaactgtggggattttctttttctaaattaggtcgattacttcacctcctgatacttgataagcaattgacctctgatttcatttaaatttgtgaatctctgtacagtgaaattctaggagagaagaggtgggtacagttaactgtcaaatgtaaagaaagataaggcaatcctgtgcccctaaactctcaggacaggtttaatagtgaaattgtgacacaccctaaaagaacaagaattactcataaagtgtttttctatttgtttcagagcttgagattccttgtcacagattctcagagagcaaaagtactttttagaaacacatttctctatgaacagtgaagaaatgttaattgggagatgatcctatcaaaaaccatcatggaacttgactgtaactcatacttatttcatttgttatagccaaaattaaaataaaatttagtagcctctcaagaattctagaaatgatgaggtggaagacgtggtaggtccccctcagaagtgaaaaattatcccatcattgtctttctctgggaactacttctttatggcattgtaggtttttctgtgaatgatttggaagagttactaaaaattagggtacaacattgtatttccagtgtgattccagctgtttttaatcattcttatattctgacacctgacctaagaaagacaccagagcatttacattgctcgtttgggggtaatgagacaaagactggaggagagtgttttcttttctctacagttttcctggattttccaaatttccttctgggtgcttgtattctttttaccttctagatggtcaggggaaaggctgagcactcctaacaaatgaagcattgtgagtttttcacaacaagtttcatgactacaagttgatggaggctgggggcattctgataggtcaggaattcttcccctggggtccgtggagtctgagggtcttctcgtagagaattccaaatcttacttcctggtgattgtaaacgtgaagttatgtgtgtgtgtttatcttgagagataccacacaagggattcagcaccacgactctggtgccattcaagtttctctggacttctctgtcacattctgtctctctgctgtctccatggttttcatctttcattgatatccagttcagaactggataactcatcttgctctttagtaggaaacctggtgtcatttggaaaccccctttaaagcagacaaaaaacatagtcacttggtttataaatgaggccaaactggaaatgggaacccaaactcagagggttggcttgagattaggacagcactgtcagttttttcctctttaaccacttaaaaggtggtttaaccacataaaaaggaaagatgccttttatttcttggaagttttttttatttcttcttacccatgatcccttggaaagggtaatacctgacatgcaaaagaagttcgggcatctggagggagacagtcctatggatgtggttgtgtcatcttggttatttttttatttatttatttttatttatttatttatttatttgagacagagtctcactctgtcatccaggttggaatgcggtggcacagtctcggctcactgcaacctccgcctcccgggtccaagcgattctcctgcctcagcctcccgagtagctgtgattacaggtgcctgccaccatgccggctactctttttgtatttttagtagagacggggtttcaccatgttggccaggctggtctcaaactcctgacctcgtgatccacctgcttcagcctcccaaagtgctgggattacaggcgtgagccaccgcgcctggcctatttttatttatttatttatttttttagacagagtcttgctctgtcgcccaggctggagtgcagtggtgcaatctcagctcactgcaaactctacctcctgggttcaagtgattctcctgcctcagcctcccaggtagctaggattaaaggcaagccccaccatgcctggctaatttttgtatttttagtagagacagggttttgccatgttggccacactggtctcaaactcctgacctcaagtgatctgcctgtctcggcctcccagagtgctgggattacaggcgtgagccaccacaccctgctcgttttttggggtttcttttctaatgctgaaagttatcgtaaatactgaaaaatagtcagctgtaaatggaagaaagtttactagaattagtgccacttcgggcccctaaataagagcaactctgtaaatataacgtaagtaatgattaaagatggaagtcgtttatgagaaaaaagtcaaaagatcacacagtaggtacaactaagaaaatgaatcagcagcacgttatttctgttaattaaaaaacgactttaatactgggatctacaattaagactaggttatatcatgttggaatagtggagaaattatctaatcatgttcaacattgatagaattgctgttagaatacaaggatgtcttgtattcaggacaccataagacagaaatctgcacatcagcagtgtccacatcctctgggccttctattccccacaccttgcacctccatttttcccaggcctgtattgcccagaatgggcttccgctcgcttcgttcacacttagctgtgttcttgttaaaggttgttcccatctgttgagttgctgtttatcacatttcagtctctggcatcagagacttcctttatgaaaagtcagaaagttcaaagaaacatggaaacagaatctgacatccacatgagtctctttgaggctttgaaaacatttatgatgatagaaatgggctgtcttagaaagttcagttcattattttcacttttcctgtagtttcctattttttctaagcttcaaaataacctgatacattgtgtttgaaatgtatagtttcaaatagtatgatttgattttgttttcctgaaattacaacctttattaaatgtagaaaacattaagttttctatattttaaagtataatgttatgatatcttggagccaattaattttataaggactgtttcttttacaatgacatttagtaagaaaattgtatgtaaattctatttctttgtggatttactttgtaatttataagaatagacatgtcacaaaatgaggtatccttgtgacttcatacattcaacagattatgtgtggggaggtttttacataggcattgtagactctggagctatagcagtcatcaagagagataaaatccctaccctcttagggcacaaattcttgtatggaagatagaaaataagaaaatgcatatgtaatataatattaggtactggtaaatgcagtgaagaaaactacagcagtgcatgaaaagaactagctgactgcattattaaaaataggcggctgggcgtagtggctcacgcctgtaatcccagcactttgggaggccgaggcgggtggatcacgaggtcaggagatcgagaccatcctggccaatatggtgaaaccccatctatactaaaaatacaaaaacaaaattagccaggtgtggtggtatgcacctgtagtcccagctactcgggaggctgaggcaggagaatcgcttgaacctgggaggcagagattgcagtgagctgagatcgcaccactgcactccaacctgggtgacagagcaagaatccacctcaaaaaaaaaaaaaaaaaaaaagaataggcagtatttcattgtccaggaaggagcaaaataaacaaaaagaatagatattatctattgatctcttacttggtaccaagcactattgtaaatgctacacatactgactgattttatactccaacaattttaggagataaacatcttcaaaataatcttagtatggtcttatttacaagttaattaggaagctaagatagagaaagttcaggaacttgcccagttggcagagccaggcaggactcatacccatgctgtgtgtcttcaaggctccatttttttattttaaaatgtccaaatcacagaacagtcaaatgaatagtattatgaacatacacatacccttctccaagattcaccatttgttaatacggtattttgctacatttgcttcctctcttatagcccttgaaagtaagttgcagacatttccatgaagttgcagttcatccttaaatatgtatgtgtacctcctaagaacaagaacattcaactacatgacataatacagttatttacctcactgaagaaattgaagagtaatgtaataccattgtttaatatattttcaatttccccagttgtcactcttagtcactgtgttccactgcctccattgtctttttctcagtgctaatacttaaccataacttgaatgtatgataacactacagagggccttcacattcatatcttttttttttaattgagacagagtcttactctgtcactcaggctagagtgcagtggcgcgatcttggcttattgcaacctccgcctccctggttcaagcaattctcctgcctcagcctcctaatgggattacaagtgcccgccaccatgcccagctaattttttttgtattattagtagagatgggatttcaccatgttggccaggctggtctcgaactcctgacctcagatgatctgcctgccccagcctcccaaagtgctgggattacaggcatgagccactgtacttggccatacattcatatcattctcataaccatccccgattcaatcatgatgacagagtctcagaagacactgttatctgggaaatgtgttcattattcttcacctcacaaccctattcttcatcaagtcaatgtggataacctcaaggagggtcaaaacccagaagaatgatgggttggccccttaatcaagggcaagtgtgagattatttcttcaaatctggctgccggtcttagaaaagacctttttgcacttaccagtattatcaaaatcaactcagaaggaaaagctaataaaaactttgctaacatctacttttgatcagttccatcacatggggtataggtctgtgagtatgtttcataaaaagattactcagcaagtcctcttctttgtaatggagagggtttgactaagctgacatattccatcctataattttcagggtaacattttgcaccacgagccaaatcttacacttcggattttaatttcctaccttgcatgctaatgccaaatatcaataccatatttaatcttaactcaaaattcctgtttcttggagttggacttccatcatgagtacaactcaagatcacattcatagaagtgtgcttccgtgtttaaggtacatgacaatgttacccgtttactcttggctttttgttgttgggcattgtagttctgtacacctgcttattggccatcactcatctatctgcttgctgatctcttaattggagatgtattgactcttggttcctctatagctctcaaatgtcacctgagtttggctcttgttctataaaatttctccaaaacaaacatcagtgaactgaaccaccacccaatgtagtatcaaatcatcttatagctacaattttataaagatacattaatatcaacatcatctatccccgtcgtctggggcaagatgttatattgtgtcctgtttttttgtgagttttcattcactgcaaaacatttattagactgtagaaaatgtactgacctactttatagccataggggcttaaacttgggaaaggaccagcccaagaataagctcctgatttcctaacaaatgaggcacagtttcccattgtttgcatttgtatttttttaacttttccagttgattaaaaaaccttccaaaatggtaaagtgcctataagatgatatctttggaggaccatacttcctgcagtaattttctttttaaattttcccttgagttatactcactcgtctccaaaatgtgctttgggaaacttgactcaaccagaaagatcctttcaccttttcttcagactctatattgggagcatgagcttcattttttgagaaacttccttccctacctggaagaggggttcttgttggctgtcatgttggttattggtaagggagttcaggtgctgggggacactgatatgatttttttccaacaactctattgaggtctaatttgcatagcagaaaatgctccccttagaagtgattcagtgattttggtaaatttatagagttgtgcagtcattgcaggaatccagttttaaaacatctctcttaccccaagaaatttccttgtgtccatttacagttaatcctccagccccttggcaaccatcactcttattgtctctctaaatttctgtaatcttttaactaaaaagaagggaattttttttatctttctgtattttacctacagaatacttttattgatcatactgtgtttttcttaatgaaattggcccaggcagtattaacacgtgaccctgcatgaacagactgtgtttgctgatggtgataaaggagcatcttgggttccattgtttgttctcttaagtcagaatatttccgttttgtgttgactctaccatctttctcattgaacattaactagaggtaattcagcctcatgtgtgtgtccacttaagttatatctctcgagagaagggacttgaaggttctaatgtctatgaggcttgactacttccatagcggcttgaatgatagcagtcattcttctttgtacatctacaggtacaacttaaagaaaccattgaagatcttcctggtaaaatggatactgaattagcagaatcaggatccaattttagtgttggacaaagacaactggtgtgccttgccagggcaattctcaggaaaaatcagatattgattattgatgaagcgacggcaaatgtggatccaaggtataaagctgaggtccatgtaaccttgagtccacattttaagtgtgtaaatgggaaacatggaatgattctgagaaatatttctaagtgctctgtttgccccagacataacattttaacatggataaattcattctgaaaaaaaaagaagaaacccaaacgtgttttccagtgtcagagatattattcagtatcccaggagagctagattcctaaaatccactcccaataatcagctttaagcaatttggagggaagacatttttcgttgttttatgaaaattagtaaattactacatagatttttatacttgtttttaaagaataagattgtcctaaaacattttaacatgatttttaaaacattaaatagatatgatcttttttttttaaatctctattgtgaagtagagctttttaagtcttaagtctactttttgcatctttacgaaattaaacttaacttctttgattgcagaactgatgagttaatacaaaaaaaaatccgggagaaatttgcccactgcaccgtgctaaccattgcacacagattgaacaccattattgacagcgacaagataatggtgagtccttcacctgcggaattcctgttgctcccaattatgttcactttttcagtttattccttccttgtaaaacttgatagaaacccctagtaagttaattttctgttaattttggctctcttcccagcagtaattcatatgcttaactacaccctcagtgctactaacaatatatccaatgtatctctttgcatataatcatatgcaaaaatcatatgttaaaagtttaccatgaaaatattccaaatctaagattcagcttgtgatgctaactgtcatactacggagtagtatccaatagaagatcacagtcattgtcactgtcacagttgtttcagcatgcttgatccccttaatgaaagatttaggtttttatatactgcaaggggcttgttgggtaaggttgcagaacttctatgctgttgggacgttcacaagatacgtgtcacaggggaagagatgagaagatccatcacaaattattttcagagagggcctagccagaaaaacaaatgattccaacagaaaggatttaacataggaaatttgttacataagaattggagggcttagaaaatgaagggaaacagtgataattttaggaagcaaggccaggcacggtggctcatgcctgtaatctcagcactttaggaggccgaggcaggcagattacttgaggtcaggagttcgagaccagcctggccaacgtggggaaaccctgtctctactaataatacaaagattacctggatgtggtggcaggcgcctgtagtctaaatgtatcatatagacttcttgttgggatttgctgttaccgcattggtgatagctactccttttattatctaatgcttggaagtgctgtcaacttagaaggtctgattagttagagagacagcaagcaaggacagaacttggcagacaagtcagttggtcactcctaaatctgatcaatcagcttctgaccacataaatgtctagttcacaagcatcttcttgatccatcagcgctgttaccattattgaagtgtgcccattagtttattgctttatataccagtccctctaggtagattttgagaaccttaatttttttctctcttgagtaatgtctttatctaaactctgaacatggttctacaaagcaatttacagttggcccctccctacctttctagcctttcctccctctgttctctctctttcctttgcagtaaaagccacagtcctttagttattgtccttcagttcatcaaacgcagcattcactgttgcggtcatgccctctctacaccatgcacaatggcggcttagactatggtgtgagcagtgaagatggtgcaatggatagatttggagtaaatagcaaagtaaagcaactggactgtgatggattgaatgtgagatttgagggaagacaggggtagtcagtcctggtttctctgtttgggacctgactatctggatgaatgaggaagacccggaagaagtaaacttggaggagggaaaggcaagcattcccttggaggatgtaactgttgagatgaccttgcatttcaacatggagctttccttctcactcccaactccattagtgtctccatctatggcgatctctccaatgatattgggagagcttccatttagggctccctggccacgaggtcatcagtggcatcacaggaggtcctaccaggaggtataaatttaagtaaggagtcttattacaagctctgaattctttgtgagaactattttccaatttttcttaacaggcagtggcaggattcagcctcagggaacccaggagacatgcattctgtagcttgagattgggaactggcctctatgttccctcaacccctagctgaaagcatctcctgtattctagagcttctgatcatcagccagctttcaattcgggggaacaccataaataccattcttcctcagatctttgattttggaggtgttttgttttttttgtttgtttgttttttccccttgtttgctttagagataccgttccagaaaacacatgttctgttctgttattctgaaagctgtgaaaacatagagacaagtgaatcagctgcaaagctcagcactccaaaaggcaggctcagggagtggctggggaagtgacagatgttaatgaaggacataaccaacactattgtcatcatgcagtcctgtaattgcaagtgcttaaggtgtaataattacgttttgttgcattggtgaatacttctccacaaagacggatagatatagttttgtttactgtaagtaaatcaaacaaaaagcttgttgggaaacaactgcgacctaattaatagctttgtttatgtgttgactctccaaagggatttacccagttttggttcattaagcgccatcaatgtgttaagcttagaattttattttatgaagatgttctcccagttttaactttattaaacatggtgtagtcttaatgacagctaatttaatcttcatttgctcagttgccacaaaacagtagagcaagacagacaaattagaaatcctcttttttctaatacgcaccactatctccacattaaagacagcttcctccctgtagtttttaggattagctggttacttgtgacctgttttcctttcagccaatagcacagccttttcctccagtccctgcacacccgtccttacaacgctctggattctccctggtagtgtgagtgaacgaggaataagcgaatctgcagttagagaattcttcgggagtgaattacagagaagcaaaaccaggcctgagaaattcagattgtagctcttttctttgtaggcaatcttatgggtgtataatgtatatctttctttctaaacccaaatctctttttagtagcgtttcctcagagaaaacaaactagaaatcgttctagcagaaccagctggagaaacacaactcaaagctaacctgagttttatttaaattctatgtttcatcttcatggaacttctctttaagaaaccgacaacggccacaattagaacatttcagaagaggaaaaattacttcttgaaaaatatgctgagacatttaattaaagtgttcagggggacaaagaactaatgtgaaggtagaaagcacaaactggggctgggcgcggtggctcatgcctgtaatcccagcactttgggaggccgagaagggcagatcacctgagaggtcagaagtttgagaccagcctggccaacatggtgaaaccctgtctctactaaaaatacagaaaaattagctgggcgtggtgccgtgtgcctgtaatcccagctactcgggaggctgaggcaggagacgcttttgaacccgggaggcggaggttgcagtgagccgagatcgcgccactgcactccagcctgggcgacagagtgagatccatctcaaaaaataaaaaatgaacacactgggagaataaatacacacaattgcagagctttggggaagtggctgagtgggtcactgggacctacccttcatcttccccaggtgagaagaatcatttactgtttcaagacctgaggcaggattttaagtaatctttgccacatgccatagtatcttgtcccagagaagagtcacaggcacccattttaccagtgagggaaccaatctccaacgtcagatgactctccgtacacccctttcatcatggtggcccagaaacgacttctgaaatggaaaccctcccaccctcactctgcctgttgctaagtggggtttctctgtattgcttgctgccatagtgaaagctgttccgagcttttcttttcctatggtcaggctttatccttcaccctgccctgcccttcccctgttcctgagatcaccccactatcagcgatggcatcctgccaattaaatggattaaattgttttgcagtttgttcacttaatttttatatctaggacagctacctggaatatctgcagatatttaggcctgataaacacatcttcattgagcttatgtaactgagtaactgactaatgcattccagtataatgtgtttttccttgaccttctagagagcagcaagtgatttgaggtttgcattgctggagagatcctggggccacgggaccaacatcaatgcatggcttagtttacagttttacttgggtagaggaaaggtgaggaccaagcaggagatttcaggactgttttcatgtagctacagaagatatgaagatacaaattcaagattatgcccttttttctgtacaaaaagaaaattcagagtcactttattttgttgtaaaagatctagaatctttggtcaaatcagtaaatacagattgagtcccctaatctgaaatctgaaatgctcctaaatctgaaactttttgagctctgatgtgaagcttgtaggagacactcattggggcatttcagattttggattttcggattaagtatgctgaatctgtaagtatgtataatgcaaacattgcaaaattcaaaagtatctgaaatctgaaacacttctggtcccaggcatttcctaagtatactcaacatgcataaaggctaagtgggtaaagttctattcttagcattttttcatgtgcatcctaacttggcccttgtagcatcagattgttccttattttctcttttccaatatttaatttgtgagtcaagcctctgccctcattcctgctgtgtctcctttttgctttttctctctcttgtctatagccatcaacttgaggcatgtggtcctccaaggctatagcctgaatcctagcatccctatacctccttccatatctgttttccagggccagctagactctttctctgctggatctcactctgtggtcttaccagactgcaccactggtcagtcacccaattgtgccctgaatttcccttcctttgtatttaacttttaggcagtgtgcatggggtgcctgctcacacgtcatgtgcaatgccaggccatggagatgcaacagtgaacaagagcaagcacataaccctgcccttgaggaagtgataggtgagctgtcagacctctcggcatctggaatgaccacggtcctcccacccctcacctccaccaccatttctacgtgtctaagtctgtccattcctcaaggcccagtttgctattttctcctccctgaagctcctcctcagaaattttggccagaggtgacttctgctgctgctaaactcccgcttgttttgccttttttctggcattctagtcacttgagtgttttcttctgtctttttttttttttttttttttgagtatgggcttcctaaaagcaggggctgggacttacccatctttgcctcttccacagcatctagcataatgacatgaatgcagtaagtgtgcaataaatgtgtgctgaataaattcaggaattcatgaaggttcacttccattttcctccaatgtgttttggcagagtgtcacttgctcattattaatcctgaaactttaatgaagtttgttttcttgggccatatgtgggggctcatgcctgtaatcccagcactttgggaagccaaggtgggaggatcgctttgagctcaggagtttaaaaccagcatgggcaacatagcgaaaccccatctctacaaagaaacaaaaattagccaggctttggcggcgtgcacctgtagtcccagctacttgggaggctgaggcttgagtccaggaggtggaggttgcagtgaaccgagaccacaccactgcactccagtctgggtaacagagtgagactctatttcaacaacaacaacaaaaaatttgtcttctttttctgtgagtatatgccaggcacacagtaaataattttgagtcctgggtgtaataggactcaaattgtagtggaaagtgaataggtgaacttttttatgcttacaggcatatttttcttaaaatatgcagttattatccaaatgaaaaggtgtcttagaaaattaactgtttacagttctcattgcccatattttacttctgaaaacaaagaaactgaaagtaaataataatgtacctctgggaactcacatgaagaggaaagaagacaggtttacacccgggttcaaatcccagctctgccatcttccgatttgtgcagcctaggctaagttgtttaacttatttgcacttccatctttatctctggctgtcagcatcttgatagactgtttcttgctcatctttgaatctcccattcctaaaatgatactttggaaatagacattcactcaatattggatgaatggatggaaggaaggaaattaccttatccattctattttgggagttttctgggatgactgtaaaagcagagcatgttcaacccattttattttccttttcaagttcacaaactgatattttagttatggggtgctttcattgatttttatggtagccatactctttgttaggtcatatttatatgccaaggatgccttgtctcaaatcttgcagattcatctgcagctataataatccagttcattataagatactatatttggggggttatttgggattttggggttttttttttttttttttggacacagagtctcactctgttgcccaggctggagtgcagtggcatgatcttggctcactgcatcctccacctcctgggttcaagtgattctcgtgccttagcctcctgggtagctgggactacagttgcacaccaccatgcccagctaatttttgtatttttagtaaaggtggggttttgtcatgttggccaggctggtttcgaactcctggcctcaagtgatccacctgccttggcctcccaaagtgctaggattataggcgtgagccactgaacctggcctatattttgttttaatgcatatcaaaaaaatattaaagaggtcggttttattttatattttttaagtgtgaaaccttatagaagttaaaattttaagttctagtaaattattaaggtcatggttctatcacccctaaactcaaaaactctcctaacaaataaaatgcagttgctaagttgttgatatttataaggcttaaagtattttgaccaaatgatctttctgtcatttttattattaatctaataataataatgctttttgagaacattatttttttttttctggctctgcctttttagattctggtcaattttgagaactcctggtctcagtggcattcatgtgttttcagacaatgagagggaatctggaaagatttactagtcactcaaatgtgaataaatttagtaggaatttggacaaggaccaaatagtagtaggacttcctttccattaaacattatgtaaagtctttacagagaactcactcactctcaactctgtgggaataatttttaaaagtttacttgttgcttttgcagactaaaacttcatcattttagcaagtaatttggttcacttatttacttagtctttagcattagagagacctgtatttttaaattgcagattttttccttcctcgtcaggaggagtggttatgttctgtaatgctatgcttaagtaaaattacacatttggggtatctaaattggcatgccaaattataggacattttaattgttatgtggatgtgacagattcaattattcttgaactcttttgagaaagctgcccttagcagtgattcacagtagtaaacaaaagattaacaggaaaatgccctttatgaggcttaataaatgtgtccgattaaataccatgggacggaattaactgcaatgtctacatgtagaaaaacaacctgtgtcctgcttggaggttcagcatattctcttaagataaatttactctaaatatggcctaactgaagaactaagtgccacttaacctcagaactgttttcctaggtacgtcatttgggccaattgttcagactctttcttccctctgaaaccattaaccaaagccactaataagtagaaatgcagagttaagagccccttcctccctctttcaatttccagtggacatattaatgagcaataaagcagctaaaaggcaagcagctcaagaaagagaaagaagcaaagaaaggtgattgggaaaacagatattcagccctcagcaatgcagactgggctgccccgtgtgccatgtgggctgtgatcacaggaatttggagctcaatttcttaattggttctttagtcttatccaaagagaaaattggatttctagagatttcttctgtgcagagagcaattatgctaaagctgcttaggtaacagctttttcggctagcctttctctctcggaataataaagtacacccagagccgatttcagaatgcaccttaacctcaccatccagagtttagcccctcttggcagctgacatgttctagaaccttaaagaaattccagaagcatttacttcttttccattgcttagagtctatgaaactggctcggcaattaatttactgtcaggtctctcccatctgatttttatgacattaccctaccttttagataaatttaatttgactttcttaaatcaagaagtttcccaactctgatcatatgtataaatacccctcaaggctgagagtctgagagttaaaagcactaagtaatgataagaacccaaaatgcctttggcagaatataaaatgccacaggactgctgagtgcccagaataatagtctagaactttcattttcttcctttcctataacattatagtaataaaaggtcaggttaggcctttgtttgcttcgtaaaacagggtaatcaaaccatttaaatactatccaggcctaccacccaaacagattctctccctctcctgcccctttccgaaatattgtctctgttataatatgttactgcaaaacattgtgtttcaatgggtttctttctgctgattaacaggttttagattcaggaagactgaaagaatatgatgagccgtatgttttgctgcaaaataaagagagcctattttacaagatggtgcaacaactgggcaaggcagaagccgctgccctcactgaaacagcaaaacaggtgagcgtgctccaaggagttgtaattaaagtttgtctcagcggctccctccgcacaatttggcaccatgggtatggtaacaagcactgtgtacccttttcaattataagcctgcagagacaaagcttcatgagtgggtcttaacggcacgtcccgggttgaagtaaggtctgcaaagagttggcagaagcgggtaggggttggggggtcgagtgtgtgcacacatgtgtgcatgccgtgtgcccaagaagcggagaggtgttagaccagactttttacacatttagactctgtgggttcagattctcatagaaaaaggcatagagcacatagtactcatattctgcaaacccattgcatttcattcttattgataggcaaatgctgttgaggtacatacaggagatttaagagtttgggcaaaaagtgtgggatattgtttattgttctagaatgatctacctagaaaatgttctacctagatctacctagattgcttttggtttctgttttattatttgtaaagaaaactgttacataatactctcactgttgacctgggttttcccctcattctttgttgtttagaattaggcccatatagcccatatgcttcctccaccttctataagaggcagttgtcaggctgggagtggtggttcatgcctgtaatcccagcactttgggaggccaagcaggcagatcacctgaggttgggagtctcagaccagcctgaccaacacggagaaaccccgtctctactaaaaatacaaaaattagctgggagtggtagcacatgcctgtaacaccagctactcaggaggctaggcagaagaatcacttgaaccgaggaggcggaggttgcggtgggccaagatcacgccactgcactccagcctgggcagtaagagcgaaactccgtctcaaaaaaaaaaaaaaaaagatgtaattgccatcaggacaaatcaagaatttataatatgttatagctatagcctgaataatccttgaagtatgtttataaggcattaaagacacgcaggctacgtgatctctttccaacaatggtgatgtggaagtatctcattctacagatgtgataactgcagtttgatttaagggacttagccagatgtcacatggtcacctgtaattcttccttaaaattctgtgaggtgagagttgtattgatggagggagggaaggaacatccaatgttcttggcttagggtggaaggagacttctagcagtacatggtgaggctcccatcaaaactgttcatccataggcagtataatatgggtataattttccttcattgttttctgtatttttcaggttttcatcactgtaggtagaataaaattgcttgtttgtgtgtaatattttaaatatctattacagacaacagaataagaaaataggggccaacatggtgaaaccccatttctactaaaaatataaaaatcagctgggtgtagtggcgattgcctgtaatcccagctactcgggagactgaggcaggaaaatcacttgaacctgggaggtggaggttgcagtgagccaagatcatgacactgcactccagcctgggcgacagagcgagacaccatctcaaaaaaaaaaaaaaaaaaaaaagaccaggcgtgatggctcacacctgtaaccccagcactttgtttgggaggccgaggcgggtggatcacaaggtcaagagataaagaccatcctggccaacatggtgaaatccatctctactaaaaatacaaaaattagctgggcgtggtggcacacatctgtagtcccagctactcagggagactgaggcaggagaatagcttgaacctgggaggcggaggttgcagtgagctgagatggcgccactgcactccagcctggcaacagagcgaaactgcgtctcaaaaagaaaaaagaaaaagaaaatatgttcccatatctaatggtatttctgtattaaagatttatccaaataaaacctaggttgccttcagctcctatttcatctcattctccacagaagtgaggaactatccttgccactgtctgtaggatatttctttgaatcctgcatttatcctcaaaacgattctataaatgcctttgtgtgcacagtattacgctgggcactagcaaatacattaaacatgcccctagtcattgacaatataagccaaagaatagagcagagcagagatttgattgatgtggtgagccctgatggcaatgatgatgatgatgatatgtgtcagatgtgcactgtgcacttctcattatgcctgtttaagaggctgaggcatagagagggaaggaaattgcccatgatctcatagctagcagaattataggcagagtccggattcaagcctggctttaggatcgacaaaaatctgtgttctgaattttcataagaatcacattgtgtatgaataaagagggaagctgtacttgaagcactgtatttcttttatacttgaaatttacagaatacttttatcttctagcgtgtctcccagccaaagcttccctcataaaacccgatcaatcatttgggattccctgtataatctagtcacaaaagagccaggaacctcaaaaaccctttttgttctttggtacctcaggcatttcacatcaaagagatgtgtccctatctatatatcaaaatacctatttaaaaaatatgttatatattatcaaggcatggagtaataagaaataggtcatagaattttagcatgttccaactaacataagataatatagttcacctttgttttacagatgaggaaactaaggccccaagaagtaagtgggccctgactaatttatagcagagacagaattaggaatctttttttaaatcaatgtttaatgcaagtataacatacatatagaaagggacattggtcatagaattgaaatctcaattactggtccagtaatcttccatctaattcaacaatattaatcgtaacttacgttcgtatagttctttataatttattttacattgtttacatagttcttacatgtatgattctacttaatcctcacagcagtctgtaagtcttactgtattgatgaggatgttgggtcatgtgtcttcatgtggacacagagctggtccgtggagaacagaaggtagattgctgggggaggccgatgtcttcccctaagtagcgttctgtgtcaagcctgaaaacgctgctccttgtctcatttggtatccaagatgcagctagtcgcccaaattcacacagtggcagaatttccttcctggattttagtcctgcctaaccactggctcaggtcacctcctctacagaaagacataaggaaatacacagcttgattctcatccaagttgaatattttcttgacatttctgcatacacttggtcctcttaggagaacaagctgtcagattgtcaaccttttaaatgtgcaagcatcaaatatcaatgcatcattcacaactgtaacaccatgaggattagtctaaatcaacaagcttttcgctctcacagattagaattcatttgttggaaggaaaactcaacatctgggaaaaggtacttccaagtcacgtattcttgaccacggagttgctttcctgaaaatgctggtgcaggcaaagctgagtctctcttttgactgacctttgcagatgactcagtattttaatattttaaagtaaatttaaattacataattacatttcaggtacataaagctgaagggtgcactggtttgctcaggctgccatagcaaagtagcacagactagctggcttaacccacagcagattatgttctcacacttccgtgctggagtctgagatcagggtgtcagcagagctgctttcctctgaggcctctctccttggcttgcagatggctatatgttcacggggtctgttcacggggtcttttctctgtgtatgtctgtgtcctgatcacctctttctctaaggacaccagtcatattggatcagggcccaccctaaaggcctcattttaacttaattacacctttaaagactttctccaaatacagtcacattctgatgtacttgggggttaggacttcaacataggaatttagggggatgcaaatcagcccataacacagggtaaattcaatcattgtcttccctgatgaagccgacctaatttgaggttcccagtgagtaacagaggtgccattttatgcactcatgaaattgccagatacaactcaaaagttatgaaatcctggccaggtgtggtggttcacacctgtaatcccagcactttaggaagttgaggcgggtatatcacttgaagtcaggagttcgagaccagcctggccaacatggtgaaaccctgtctctactaaaaataaaaaaattagccaggcatggtggcgcatgcttgtaatctcagctactcgggaggctgaggctggagaatcacttgaacccaggagatggaggttgcagtgagcctacgtcacacgactgcactctagcctgggcggcagagcaagactccgtctcaaaaaaatatggatggatggatggatggatggatggatggatggatggatggatggatagatagacaagaagtcctgacatcctggatcctaggagcctggggcctgtttgaataggtggaggagacacttagcagccaatggccttacagaagtcacccaaggcctgtgagcctcagaggcctcacctgtcatgccaggattgcagtactgctccggtttcttcactgttaacatgtattaaatgagatagtgtatgtttaagtgagtcaaagaatataaggtgttttacaaatataagcgaattctagctattggttataaaagctcagtacttttttaagactgtagactgaactcttagctcccaataatagcaaaagaagtatccaaagttttgtagctttatagactaaataattacaaattatttttaagaatcagcttaccaaatgatatatgctcatgttacaaaattcaaagcattgatagttttgcaaaaaactttaataagtaaaaagtaagtcactctgccacacctgcctttcatcacgcagttcctctgccaggtttcagccctggcannnnnnnnnnnnnnnnnnnnnnnnnnnnnnnnnnnnnnnnnnnnnnnnnnnnnnnnnnnnnnnnnnnnnnnnnnnnnnnnnnnnnnnnnnnnnnnnnnnnnnnnnnnnnnnnnnnnnnnnnnnnnnnnnnnnnnnnnnnnnnnnnnnnnnnnnnnnnnnnnnnnnnnnnnnnnnnnnnnnnnnnnnnnnnnnnnnnnnnnnnnnnnnnnnnnnnnnnnnnnnnnnnnnnnnnnnnnnnnnnnnnnnnnntttttaaagcagtttcactcctgttgcccaggctggacctctatggtgcaatctcagctcactgcagtctccatcaagtgattctcctgcctcagcctcctgagtagctgggattacaggcgcccaccaccatgcctggctaatttttttgtatttttagtagagatgggtttttaccatgttggccaggctggtcttgaacttctgacctcaggtaacccacccaccttggcctcccaaagtgctgggattacaggcgtgagccaccatgaccggccagttacctcattttttaatggctacctagtatttatactttttccactctgtacttttcacttttcccaattaacttccaattaagttagctatttttgtttttttcctggtgaatgacttatcagatttatttactagtttatattctgtttcccagttgatcagtttctgcttttatctttattacctttgttttttggtttttctcgttgcttcttcttgaatgcatttgtgtccattctttcttccttagtattttagcgctgtgaattttcgtattctgttggttttgatatgtagtgctttcactcatagtttattttttatttatacattctgcaattttggattttaattttctctggcccagaaattattgaagagggaagtttttaaaactttttggtggtagcggtttgttttttctgttcatttcttttctgttttacgcatcagtttcattttcattgcatgtcatccatatcctttctatccatttggaattttctttgtgtcctagtttttctagatgttctttgggcattgaaaagatggtgttatctgtttaaggtatagagtttaataaggtttaattagttctactttgttaattacattcttattaatccttatttatattggtctattttctgtgacttggatctagaggtgaattagtttcacactgtacatatttctctttgtagtacctgtcatttttgttttggtaactttgatgctatggttttcagtccacagatgttcataacttgggtttccactatgaattatatttcctgccattttaacacacctttctttgattcgtgtaatggttttggtcctaaatccacactggttcaaaactagactgggtcgcgtgcttttactttgctttctttgtctgctatatatgggattgtctttgaatatccaaaggtgtgtctcctgtatatggcgtggttaggttttactctgaggtttaatcttagcctttgtttttaatagatgattttagtacatttacatttattgagattataagtatgttttgtcttagttctgtcatgttatgctttcagtttttagtattcctttttaccttttaatttgtagtagataatttttgtttctttgaatattgttttgcatgtgttccttttgtttcctctaaatgctgtttcttgactccccattataaacaataacaatataaatacacttctgtctccatcctaccaccaaattttagcttagtttttcttctatttgccttcaaaccccaaatatacttaagcctctgttatttggcttttctttaaatgatactttctccatcttttagttagctaaagtttatccttcagtgctttttaaacctcaggctacaacccactagtggtgctgtggaatcaatttggtccatcatgactagtgtgttttaagatgtaaaatagaatacaatggaatagaagaaaaataacatgtatctttcatagtaatggtaatattttttgaaatgcttttcagtatagatacagatataggtagtggatgcgtaccaagtccctgtgtacagtgaaatgtgccacccattattgtgggtggcagtttaaaaaaaaaaagttgcaaaacaatgctctataccatctcaaagggaaaggttccttggaatttagaatccctgacttattgcatgtctgaaatctttgttacccctctgatttaaatgtggtggctgtaccatggcacacatttacctatgtgacaaacctgcacgttctgcacatgttatcctggaatttaacataaaaataaaaattttaaaaagttgtggatataaaattattgggtcacaccttctttcacttagtatgttgcagcctttgctctaaggtcttctcgtgttgtctgttcatatggagacatctatgaccatgtttgacacaactcagccttttttctttctttctttctttttcttttttttttttgagacagggtcttgctctgttgtccaggctggagtgcagtggcacaatcatagctcactggagccttaacctcccaggctcaagcaatgctcccttctcagcctcccttaaagctggaactagaggcacatgccaccatacctggctaattttttttccccccatagagacaaggtctcactgtgttttccatgctggtcttgaactcctgggcttaaaccatcatcccaccttggcctcccaaagtgctgggattacagatgtgtgccactatgcccagccagatcttttttcttgtatgctgaaagggtcattagttttcctaggacattattgtgcagtctttcagactttgattcaagttttcttttttttctggaagtttacttgaattatatccttgaatttttttatttgattatattctcttctttacaaatatctatcatgtatatgttttatgtcctttgtctattttgtaaagctattttctccttaatcctttttagttctttattaacttttagttattttgtttgtttgctcaatcctatcctgtgtctcacactgttttttcagcattggctaatctttgtgctgccttcagtagaaatgccacttatttttttattttttattttcccttttttgagacagagtctccgtctattccacaaactggagtgcagtggcgtgctcttggctcactgcaccctccaactcccggttcaagcaattctcatgcttcagcctcccaagtagctgggattacaggtgtgcgccatcacaattggctaattcttgtagttttacaagatttcattatgttcattatatgatacaagttttcattatgttggccaggctggcctcgaactcctggccctcaagtgatcctcccacctcagcctcccaaagtgctgggattacaggtgtgagccattgcacctagcccatttctttgatattttcacttttcttttccacttcacttttgaccactgtcaactcatgtttcagcatcttctgttgctctgccatgttttcctgtatttttgtatctctgttatgcacagcctgatcattctgctgcattttctttgaatgaattatattcataaactctatgtgctcaacatttgtcatgtgtttatcttacttcatttcttatttgtataatctccaggccctgtactactcttaaaattataataataatttttattattcctactcctcacctatgactaaaacgaactcttcctagaccagatagttacaggatagttgtggctagggccttgtttctggctaaagggaatttttctgtgcttaatgtagaagtactttatgacccagagaggctgcgtgtgtggtgggggggatgcagggagggatgtgagtgtgtatgtgtatgggtgtatgggtgtgtgggtgtgtgggtgtgtgtgggggggttggggtgccccatgggtgtgtggtgggggtgtgtgtgagggagggtgtgtgtgggggnnnnnnnnnnnnnnnnnnnnnnnnnnnnnnnnnnnnnnnnnnnnnnnnnnnnnnnnnnnnnnnnnnnnnnnnnnnnnnnnnnnnnnnnnnnnnnnnnnnnnnnnnnnnnnnnnnnnnnnnnnnnnnnnnnnnnnnnnnnnnnnnnnnnnnnnnnnnnnnnnnnnnnnnnnnnnnnnnnnnnnnnnnnnnnnnnnnnnnnnnnnnnnnnnnnnnnnnnnnnnnnnnnnnnnnnnnnnnnnnnnnnnnnnnnnnnnnnnnnnnnnnnnnnnnnnnnnnnnnnnnnnnnnnnnnnnnnnnnnnnnnnnnnnnnnnnnnnnnnnnnnnnnnnnnnnnnnnnnnnnnnnnnnnnnnnnnnnnnnnnnnnnnnnnnnnnnnnnnnnnnnnnnnnnnnnnnnnnnnnnnnnnnnnnnnnnnnnnnnnnnnnnnnnnnnnnnnnnnnnnnnnnnnnnnnnnnnnnnnnnnnnnnnnnnnnnnnnnnnnnnnnnnnnnnnnnnnnnnnnnnnnnnnnnnnnnnnnnnnnnnnnnnnnnnnnnnnnnnnnnnnnnnnnnnnnnnnnnnnnnnnnnnnnnnnnnnnnnnnnnnnnnnnnnnnnnnnnnnnnnnnnnnnnnnnnnnnnnnnnnnnnnnnnnnnnnnnnnnnnnnnnnnnnnnnnnnnnnnnnnnnnnnnnnnnnnnnnnnnnnnnnnnnnnnnnnnnnnnnnnnnnnnnnnnnnnnnnnnnnnnnnnnnnnnnnnnnnnnnnnnnnnnnnnnnnnnnnnnnnnnnnnnnnnnnnnnnnnnnnnnnnnnnnnnnnnnnnnnnnnnnnnnnnnnnnnnnnnnnnnnnnnnnnnnnnnnnnnnnnnnnnnnnnnnnnnnnnnnnnnnnnnnnnnnnnnnnnnnnnnnnnnnnnnnnnnnnnnnnnnnnnnnnnnnnnnnnnnnnnnnnnnnnnnnnnnnnnnnnnnnnnnnnnnnnnnnnnnnnnnnnnnnnnnnnnnnnnnnnnnnnnnnnnnngggtgtgtggggggtgtgggggtgtgtggtgtgggtgtgtgtgggtgtgtgtgtgtatgtgaaattgagagtgcatgtcctgcctttcttcctccttagcttacagaatacgggcaattgcaatctgtcttctgtcaggacctcaccaatgtacataggtcagtcaaagatgtttctaattgattctttattgacataccttagcgctcctccaattaactgggagaattcctatgattgttgaggcttgctcttcatagacatcttctcagccttgccacagccccattggttccagttgcatatggcagcccttcatgatattttaccattcaggctctcctgatttcacaaagatttagcttattttttattaatgaatatctttgatgttcagagtggtttctgaaaggaaaaggagaggaaattcattactccattatattaaaagcagaagtcctttctaagtctccattactctttgacaatatgcatgccaattatgtacaccaaaattagactggctttaaaaatgatgaacttgaggccttgagagttactgtgattgaattagggccatacacatcagtaaaaatgaactgacagggtcttgagcctgaattcaacacatcagatggtatcttaggaatgcaatgtcaatcaaagcccagttgctctcctttgtccacgtgcgggagcttgtattgctctgttgattttagtaaaatctagctctgttacggtggctttactgatgagttagagtttaaatatgaacttagtttcatcctacattagaggaactataatggagcaaactcaagagaagaaggaaaagagggacaaggtttcccatactcactgacctgatactcttcttgccgcaaacgtgaacgcttatggcattgtctcccttaagcttcacagtccttctgacctgctgttattatccccttttgacacatgaaaatgctaaagtacaagaatctgagtaactttttttttttttttttttgttttgagacagtctctcactctgtcacccaggctggagtgtagtgttgcagtctcggctcactgcaatctctgcctcctgggttcaagtgattctcctgcctcagcctcccgagtagctgggactacaagcgtgcaccaccatgcctggctaatttttgtatttttcgtagagatggggtttcaccatgttggccaggctggtctcaaactcctgacctcaagtgatccacctgccttggcctcccaaactgctgagattacaggtgtgagccaccacgcccagcctgagtaagttttcaaagccaccagttcaaaagtgttcatactccatcttctatgatctttcagttctacctttctgcctcccaggttaccatattcattcagttgaaattgtctcagccacagctttgggattctgtaaagataaaagatgcaccagagggattcctaaatgctttgtcttcatccttcgagctgggcgatacctccacgttctgtgtgcttaggggccacttctctgagcagcattcatcatgacacccaacactaatgcagcaggttttcaacctgtagtttgtagccattaatcagttcctgtgacgtaagctattgttatctcatgttacagatgaggcagctggtagagagagtggttaggtaatttttccagaatcagcagtgaatccaggagagagctgagactggacctgtctatcccagacatagcttacaacatgagggctttgctaaaagtagttcagtaatctcaactcccttcatcacctgcactgtaaaaaagatgtttcatctcacctgtgctgttacccatagtgtgttataaaacctggtagcagaagagaaaaagaaaggtcaaatcaaagaatatatacacaggaagtttgtttttgactaagtatttcagaccatgaagctaagaccatttgggtttaaagttgctaataacaacactttctttatatatatttaaaaaaatacatcaagagggttacacagaaggaagcagcctatttggggaaggctatcaagcagtagaaagtgatgtgaatgtctatttgttcttttggctgtttttagtttcactacagaatagcctttttggagtacataaatctataaccacacaaaatatggctagcttaaaaaagtgggagagggagatgatatgaaattatcccctgaaaagtcttacttttgaacacttgcattataatggaaatagcctcagatttcttctggtggcattccagcattattggacaatttattttctccttaagtgacattttagtacattgtgtgttatatgtaatgatatttctggagtaacaagtgtgcaagaagtgagagaaaaagaaagtacacttaatatgtaggcaggtgtctcagcactttcttttttgtacgtgaatcccattatctccagtgataactttgttgacagcacccaccaatatattcagagcaaggttttataaaatagatccagaatcgtatgactaagagacccaggtgacacgtgtcagcctcagatagttgctacattttctgttttaaagattcaaacaaaacttttcacattcttctttggggaaaaaaaattacatttgaagtcctttttcacccaaacacgttttgagataagagctcacaagtcttgacattatttcattttgttatgcgcatctgtcaaggaaccaagatacgatacagctactaaaaactgatgattgtggaacagagaaacttgacagcatttcatttcctttatgttctgattatacgtttatcagaaaacctgtatctcttctagttcagctagaaattggtagaattcaggaactcaaaggcttggcaaagaactgtcctattatttggtatcatcttacattttagagaagttgcttggttgagtcattgttaaagcttttgcttctcttttcattattgtgggccactatccacagaccacatttctataggccctataactgctttgccgcacaaattaaacgccgggatgtttcatacgtatatgccagcatttcaatgcttgtcaatcagagtttataaaatatagggattacaacttgatattaacatccaaatctattgtgctcattttacgtgtgaaaatgagaaaccctcatgcagacgctagatttcccagcctctttgtcaccctgtttttaatttatctccaggttttgagtcagtaaaatgattccgcttatcaatttaatacagagataaaacatatctatgaatcagagtgatcggaactaaaatggatctacaggttgtttggcattcagcccagccctgctgagggttttagtggggctaatttctctgtacagtagattcatccctgttcttaaattgtgcctcagtgagggatatgatttgcttcacatgaagaagtagacacagaagtgcattgtttcagggaggagactttaaaattttgaaacattctttttatgcttaccttttttttttctaggtatacttcaaaagaaattatccacatattggtcacactgaccacatggttacaaacacttccaatggacagccctcgaccttaactattttcgagacagcactgtgaatccaaccaaaatgtcaagtccgttccgaaggcattttccactagtttttggactatgtaaaccacattgtacttttttttactttggcaacaaatatttatacatacaagatgctagttcatttgaatatttctcccaacttatccaaggatctccagctctaacaaaatggtttatttttatttaaatgtcaatagttgttttttaaaatccaaatcagaggtgcaggccaccagttaaatgccgtctatcaggttttgtgccttaagagactacagagtcaaagctcatttttaaaggagtaggacaaagttgtcacaggtttttgttgttgtttttattgcccccaaaattacatgttaatttccatttatatcagggattctatttacttgaagactgtgaagttgccattttgtctcattgttttctttgacataactaggatccattatttcccctgaaggcttcttgttagaaaatagtacagttacaaccaataggaacaacaaaaagaaaaagtttgtgacattgtagtagggagtgtgtaccccttactccccatcaaaaaaaaaaatggatacatggttaaaggatagaagggcaatattttatcatatgttctaaaagagaaggaagagaaaatactactttctcaaaatggaagcccttaaaggtgctttgatactgaaggacacaaatgtgaccgtccatcctcctttagagttgcatgacttggacacggtaactgttgcagttttagactcagcattgtgacacttcccaagaaggccaaacctctaaccgacattcctgaaatacgtggcattattcttttttggatttctcatttatggaaggctaaccctctgttgactgtaagccttttggtttgggctgtattgaaatcctttctaaattgcatgaataggctctgctaacgtgatgagacaaactgaaaattattgcaagcattgactataattatgcagtacgttctcaggatgcatccaggggttcattttcatgagcctgtccaggttagtttactcctgaccactaatagcattgtcatttgggctttctgttgaatgaatcaacaaaccacaatacttcctgggaccttttgtactttatttgaactatgagtctttaatttttcctgatgatggtggctgtaatatgttgagttcagtttactaaaggttttactattatggtttgaagtggagtctcatgacctctcagaataaggtgtcacctccctgaaattgcatatatgtatatagacatgcacacgtgtgcatttgtttgtatacatatatttgtccttcgtatagcaagttttttgctcatcagcagagagcaaccgatgttttattgagtgaagccttaaaaagcacacaccacacacagctaactgccaaaatacattgaccgtagtagctgttcaactcctagtacttagaaatacacgtatggttaatgttcagtccaacaaaccacacacagtaaatgtttattaatagtcatggttcgtattttaggtgactgaaattgcaacagtgatcataatgaggtttgttaaaacgatagctatattcaaaatgtctatatgtttatttggacttttgaggttaaagacagtcatataaacgtcctgtttctgttttaatgttatcatagaattttttaatgaaactaaattcaattgaaataaatgatagttttcatctccattcagagatctgtatttctgtgcttcaagggattcctgactcatgttcttgctgatgaatgccagtgagttttcctgagatcgaaaaatacagtatcaaaggataccttctatcatcaaccggttctcttggcaaattaggtgtaccaagtattctaacgggtagatttcagtgggtttcagacagtttgaagcagttgctatttaagcaagtccatttgcaccattctaggaagaaagagtattagcttatgcctcaggcttgagcagtattaaatggttgaggtttttgcttttggttttggtttttaaggtgactttgtccaaaactaacaagaaacatctaccgctgttacgctgaaatcactattaaataatgattctcaaaatgtggtccctggaccagcagcataccgcatcacctgggaactcgttagaaatgcacctttttgtgcctcaccgcagatctactgaatcagaaactctggtggtgggggccaggaatgtgtgttttaacaagccatagggtgactttttttaaggggccatgctaatctctgtatcattacaattttagtatatgtgctactgaagcgagcgccctaagtgtgattctgatgcaggctaaagtctgagaaccagtaccataaacttaaagaactcttaaaactcattaagaaaaacacagaaagcccaattagagaaatggacaagagatttgaatgggtatttcacaaaagagaatatccaaatggccaataactggaaaagtgctcactctttattagttaccagggaaatgcaaattaaaagcaccatgagataccactagacaccactagaatgtgtaaaatgtaacagactgagaataccaacccagtgccaatgaagcaacaggaattctcaggtactgccatgtaagtacattgaaaaaccatcttcggaaaacaatttgacagcattgactcaaactgcacactctgcgatctgtctgtagcactccaaatgtgtacacatgtgcaccaagagatgttgtcaaggatgttcctagaaacataattcctaacagcccaaacgagataatccaaatactcatcagcagcagaaggaaaacaaattatgaggtattaaaatacttctacagcaatgaaagcaattgactacatgaagaactcatgagtttcacagacatgatatttattccaaagaaacctggcccaaaagattatttatgatcccatttatataaaattcaaaaatgttacagctgaacaaaggagtgcaacaccagaacagttcataactttggggagatggaaggtgttggtaattaggggaaatacacatgaatcttctacgatacttaaaatactttttgtggctgggcatggtggctcatgcctgtaatcccagcactttgggaggccgaggcgggcagatcatgaggtcaggagatcgagaccatcctggctaacacggcgaaaccccgtctctactaaaaatacaaaatattagccgggcatggtggcgggcgcctgtagtcccagctactcgggagcctgaggcaggagaatggcgtgaacctgggaggcggagcttgcagtgagccgagatcgagccactacactccaacctgggcgacacagcgagactccatctcaaaaaaaaaaaaaaaaaatttttgtttggctgggtggtgattagatcgttattaattgaacacttttatgtgtcatacttcacactgagttaactttttaaaaagttggtcttgtttttcctttagaatctcagattcagtgcttcagtcttcaaaaagggaataatttacacgtaggaaattacttctgctgagttcttaaaataagaagctctttgacggttgtcttttgtggtccatcacagctgatgcgtctgatggttttggtacctgagaagccaaggtctatattttctctaaccaataaataaaataaatctcacttcctcttcaattttaggataagtacaaaaataaggaactctaaggtttttctggattctatttgtttaaccactctactgaggtatgactggcatatagaaagttatacatatttaatgtgtatgctttgtgtttggagacaaatatcacctatgaaaccatcaccacattctatgtcataaacatgtccatcacctcaaagtttccacctgctcattttctattttttaatctccattagaggagatgaggtacataaataaaataatttcagggacttggtctcggcaaagatgtatggctaagacttcaaggacaggcaatttaaatagacaaatgggactatattaaactaaaaagcttctgcacagcaaaggaagcagtcaacagagtgaagagacaacctgttgaatgggagaaaatattctcaaagtattcatccaacaagggactaatacctagaatatacgaggaactgcaacaactgaatagtaaaagacccacataattccattaaaaagtggggaaatgacatgaacaggcatttcttaaaagaggacatacaaatgtccaacaaatatatgagaaatgctcaacatcactaaccatccaggaaactcaaatcaaaaccacagtgagatatcaccacaatgagatatcaccttcccctggttagaatggctattattaaaatgagaataaataacggatcctagtgaaaatgcagaaaagagggaacttttacatactgttagtgggaatgtaaattaatagaatcctatggaaaatagtatggagatttcttttttttttttttttttttttnnnnnnnnnnnnnnnnnnnnnnnnnnnnnnnnnnnnnnnnnnnnnnnnnnnnnnnnnnnnnnnnnnnnnnnnnnnnnnnnnnnnnnnnnnnnnnnnnnnnnnnnnnnnnnnnnnnnnnnnnnnnnnnnnnnnnnnnnnnnnnnnnnnnnnnnnnnnnnnnnnnnnnnnnnnnnnnnnnnnnnnnnnnnnnnnnnnnnnnnnnnnnnnnnnnnnnnnnnnnnnnnnnnnnnnnnnnnnnnnnnnnnnnnnnnnnnnnnnnnnnnnnnnnnnnnnnnnnnnnnnnnnnnnnnnnnnnnnnnnnnnnnnnnnnnnnnnnnnnnnnnnnnnnnnnnnnnnnnnnnnnnnnnnnnnnnnnnnnnnnnnnnnnnnnnnnnnnnnnnnnnnnnnnnnnnnnnnnnnnnnnnnnnnnnnnnnnnnnnnnnnnnnnnnnnnnnnnnnnnnnnnnnnnnnnnnnnnnnnnnnnnnnnnnnnnnnnnnnnnnnnnnnnnnnnnnnnnnnnnnnnnnnnnnnnnnnnnnnnnnnnnnnnnnnnnnnnnnnnnnnnnnnnnnnnnnnnnnnnnnnnnnnnnnnnnnnnnnnnnnnnnnnnnnnnnnnnnnnnnnnnnnnnctggccagtatggtgaaaccccatccctattaaaaatataaaaattagccagtacatcgtggcacatgcctgtaatctgtaatcctagctactcggcaggctgaggcaggagaattgcttgaacctgagagacagaggctgcagtgagccgaggtcatgccactgcactccagcctggataacagaataagactctgtcttaaaaaaaaaaaaaaagatgtaccatacaaaccagcaatctcactaactgtgtatttacccaaaggaaaagaaacatatatttctttcatcagtatatcaaagggatacctgcactcttacatttatcatagcactattcacaatagcaaaaatatggcatcaacctaagtgtccatcaatggatgaaataattttttatatgatgtacatatatgtaccatgcaatactattcagccataaaaaaaagaatggaaccatgtcatttgcagcaatgtggatggaactagaggtcattctgttaagtgaaataaggcaggaacaaaaagacaaataccacatattctctcatattggagctaaaacatttaatctcttggaaatagagaatagaatcatagataccagaggctgggaagggtgggtgggtgagagagggaggctggttaatgggtatgaacacaagtagaagaaagaagttctaatgtttaatagcagcctagggtgactatagttagcaacaatacattatatatttcaaagtaactagaagagaggacttgaaatgttaccagcacatagaaatgataaatactgaaggtgatagataccctcaaatgccctggcttgataattacacattctatgcatgtaacaaatacatgtatcccataaatatgtaattttaaaaatatatactatgtatcaatagaagaaataatgctaagtgcttttattaataacactataagtggttgatgtcttgtgaagaaacaactttaatcaattcaatgagtcagtgaattagatttattatgtagtattgttcaatttagtgagttgagttaatattaatttatcagctgattaacttgtccttatgtactgcaatgaaaattcgtgtttttctttcagagggtttgactgtggagattttagaagcctgtcttctcaaatctcggtatttgtttcaaatcccgttctcaaaagattaatgtatgccctgaagtatgttagattttgcacctgaatgaatgtgtaagtcacttcccacaaccaattctgttttagagcgttttcaagatctgcctttacctagaagactgtatgacattctggccatcacagctcaaaataatgtctttataattccacaaatgtgatatgcattactaatggacttattttactaaaagcaaagagagaaatctatcacctgaaataaagaaaactaagaatgttcaacaagtaatgctcatcctaaaagccatgtctatgctcaacccaacttattcaccaaatggtctaattctcaaatcctcattctttgaaaattgagtaaatgtgtgtcaatgaaatacttccaccctacttgataaatagtatagttatggactacattattccccaaatatagattgaaaaacaaatagttttcctcaaaaattgtaataaactcatggtttaatttccacaaaatatgttatatgtgttttaatggatatgttgatccttatcaaatggaagttttcaacccagagggtaattcattcacatacagagtccttgtttccactattttatatcggatttcaggatttagaaataagtgttatgattctgcagaagctagatgggggttgggaagaaataagtcttacgaatataactaacagttttcaagtaaaaatcctccccaagccctagaagcttctttggtctgtgctgcagtttgattatctgggatgcagactctgagatggagtttggtgttccggatgtttattacagagttacccttggaattaatccttgtggaatgaagagggaagaagcaggattgggtggatggagaaattgagctggagtgctagccagagagaccagctgatcccaccaggaaccctggagctaaaatggtccatgagggtcgtcctgtgtgccaatggccagggctttctccctccaccttgattagtcattgcatgagggctgtccccaaaaggggtgacagcagaaggttgcccagcaactacacctccagaagctgggacaagtccttgaagggggtgatgggtggcacatctccatgtccaccacagtgtatgttccagctctggagggagattattgaggtgttcagtggcagaagactcctggtgattggcatttaagtcaaaatgaattgccagttgacaggagatggctgatgaagtgattgtcttcaacaacctatgacctgaaaaagagaagagaaggtccatgcaggggaaatatcctcgttgtctttattctctaaaatcagccgtgttcatttattccaggaagtgatcttacgagcagtcttcggattggctaactcctatgtatgtcgataataccctgagcacccctcattacaatgaatcatagctggggtctgcagtgtgcaggactcctgcttagaaggacccagcacttagtttaatgccctgttttcgccatctagatattctgaagttttaaacaaagggccctgcttttgtattttgcactgggatctataaattatatatgctgccctgagtatttgtggttctgtttcctctctaaaccatgagcttctgaggacttggaccatgccctgttgattttaaaatctgcatcttctagcacaatgtctgtcacatcgtgggtgctcataaatgtttgctgagtgaatggataatgactgggaagaagccttcctttaaactgtaattctgagatttaagggagtatcctggggtagtagaaagatccctagtttgggggtcaatcccatatatctggcagccaattctgtcttagctactccctagcaatgttgggtgatcaaagtatatgctgtccgatgtcggagacttttgagagtgaaaagaaagcactaaccagccatggtgccagggcaataaattgggactgtccttgacaaatggggatatggccaccctatagccatgtatccttggttacatgcttggataagtttctgtctctatgaacctcaactgcttcatctgtaaaatggacatagttcctgaacttgcacagttgctttggttgggatgattggtggaccaagagcatccaacagaacagaaaggttaggacctagagggaaatgcattgagtttgtatagtaagaaggtcccttcttccatcatgagaggagagtaagataaatgtggatgaaggtaggtttgtaaactgtagaaggtgtatttcaggaggtcctcaccatggcctaaaccgaactgttcttactttacatagagttaaaatgaaacaagcacacacgagaaggagcccaagctctggagtccaccttcctgggtccgaatgctggctcctctgtgcagtgggagtggctgcctgggtttgagtccaagttctactacctgttaattgttggcccttgtgttgggaagcacactatgcttccatttctttttctgtaaaattgaggttggggtggtacttttctcagagggctgttgggaggatgaaatatgaaggacgtactctacaacagtgacgctcaaagcatggtctgtgggctagtgccaggccatgaactgttcgtaacctcaggccacaataagtacaggaatttcaggaaagccattagaaacctttataggcttttgactttgccatgacatccaaactcatgattgggggactccttgtggagcagccaagagtttgttgaacctggataatgaggcatgtgtggtgtgagtagcacattagccatgcacagtagaactacttattagtttgcaatggattgaaaatttaaaataattaaataaaacctattcttaaccccagataattgagaagcaccattttagaacaatgcctggtgtgcaattagctctcagtaaacacaagcctctttattaatcagggaaaaattataccatgacttacatgtttaaaattaggctacacagactttccaaatgctctactatacattagcaatattctaaaatagcattaaaagccaaaatcctgctcattgttaattagggatgtgtaaagtctaaaagtattttaaaaacgatgctatgcatatgtttacaccaagtctattcttgaattaacagcatgatcttgatgttgaaggtggtagctgggtacacatcaggccacttgtaaaagtggggaacatggggccgggtgcggtggctcatgcctgtaatcccagcactttgggagaccgaggcagacagatcacctgaggtcgggaattcgagaccagcctgaccaacatggagaaaccccgtctctactaaaaatacaaaattagccaggcatggggtcctgcgcctgtaatcccagctacttgggaggctgaggcaggagaattgcttgaaccagggaggcggagattgcagtgagccaagatcgcaccattgcactccagccagggcaacaagagcgaaactctgtctcaaaaaagaaaaggggggggggaacacgggttgatatgcagggtattgactttcctttaaaaacagaaagaatgtgggttaactgaggttttgctttttaaatgtaatgttctaaagaaaataacctcatcttttcaaaaataaagcagcagtgtagattga

SEQ ID NO: 1154 - DNA, 3913 bp, Homo sapiens
tgttaacaggtggctcaatcccttgtttaaaattggccataaacggagattagaggaagatgatatgtattcagtgctgccagaagaccgctcacagcaccttggagaggagttgcaagggttctgggataaagaagttttaagagctgagaatgacgcacagaagccttctttaacaagagcaatcataaagtgttactggaaatcttatttagttttgggaatttttacgttaattgaggaaagtgccaaagtaatccagcccatatttttgggaaaaattattaattattttgaaaattatgatcccatggattctgtggctttgaacacagcgtacgcctatgccacggtgctgactttttgcacgctcattttggctatactgcatcacttatatttttatcacgttcagtgtgctgggatgaggttacgagtagccatgtgccatatgatttatcggaaggcacttcgtcttagtaacatggccatggggaagacaaccacaggccagatagtcaatctgctgtccaatgatgtgaacaagtttgatcaggtgacagtgttcttacacttcctgtgggcaggaccactgcaggcgattgcagtgactgccctactctggatggagataggaatatcgtgccttgctgggatggcagttctaatcattctcctgcccttgcaaagctgttttgggaagttgttctcatcactgaggagtaaaactgcaactttcacggatgccaggatcaggaccatgaatgaagttataactggtataaggataataaaaatgtacgcctgggaaaagtcattttcaaatcttattaccaatttgagaaagaaggagatttccaagattctgagaagttcctgcctcagagggatgaatttggcttcatttttcagtgcaagcaaaatcatcgtgtttgtgaccttcaccacctacgtgctcctcggcagtgtgatcacagccagccgcgtgttcgtggcagtgacgctgtatggggctgtgcggctgacggttaccctcttcttcccctcagccattgagagggtgtcagaggcaatcgtcagcatccgaagaatccagacctttttgctacttgatgagatatcacagcgcaaccgtcagctgccgtcagatggtaaaaagatggtgcatgtgcaggattttactgctttttgggataaggcatcagagaccccaactctacaaggcctttcctttactgtcagacctggcgaattgttagctgtggtcggccccgtgggagcagggaagtcatcactgttaagtgccgtgctcggggaattggccccaagtcacgggctggtcagcgtgcatggaagaattgcctatgtgtctcagcagccctgggtgttctcgggaactctgaggagtaatattttatttgggaagaaatacgaaaaggaacgatatgaaaaagtcataaaggcttgtgctctgaaaaaggatttacagctgttggaggatggtgatctgactgtgataggagatcggggaaccacgctgagtggagggcagaaagcacgggtaaaccttgcaagagcagtgtatcaagatgctgacatctatctcctggacgatcctctcagtgcagtagatgcggaagttagcagacacttgttcgaactgtgtatttgtcaaattttgcatgagaagatcacaattttagtgactcatcagttgcagtacctcaaagctgcaagtcagattctgatattgaaagatggtaaaatggtgcagaaggggacttacactgagttcctaaaatctggtatagattttggctcccttttaaagaaggataatgaggaaagtgaacaacctccagttccaggaactcccacactaaggaatcgtaccttctcagagtcttcggtttggtctcaacaatcttctagaccctccttgaaagatggtgctctggagagccaagatacagagaatgtcccagttacactatcagaggagaaccgttctgaaggaaaagttggttttcaggcctataagaattacttcagagctggtgctcactggattgtcttcattttccttattctcctaaacactgcagctcaggttgcctatgtgcttcaagattggtggctttcatactgggcaaacaaacaaagtatgctaaatgtcactgtaaatggaggaggaaatgtaaccgagaagctagatcttaactggtacttaggaatttattcaggtttaactgtagctaccgttctttttggcatagcaagatctctattggtattctacgtccttgttaactcttcacaaactttgcacaacaaaatgtttgagtcaattctgaaagctccggtattattctttgatagaaatccaataggaagaattttaaatcgtttctccaaagacattggacacttggatgatttgctgccgctgacgtttttagatttcatccagacattgctacaagtggttggtgtggtctctgtggctgtggccgtgattccttggatcgcaatacccttggttccccttggaatcattttcatttttcttcggcgatattttttggaaacgtcaagagatgtgaagcgcctggaatctacaactcggagtccagtgttttcccacttgtcatcttctctccaggggctctggaccatccgggcatacaaagcagaagagaggtgtcaggaactgtttgatgcacaccaggatttacattcagaggcttggttcttgtttttgacaacgtcccgctggttcgccgtccgtctggatgccatctgtgccatgtttgtcatcatcgttgcctttgggtccctgattctggcaaaaactctggatgccgggcaggttggtttggcactgtcctatgccctcacgctcatggggatgtttcagtggtgtgttcgacaaagtgctgaagttgagaatatgatgatctcagtagaaagggtcattgaatacacagaccttgaaaaagaagcaccttgggaatatcagaaacgcccaccaccagcctggccccatgaaggagtgataatctttgacaatgtgaacttcatgtacagtccaggtgggcctctggtactgaagcatctgacagcactcattaaatcacaagaaaaggttggcattgtgggaagaaccggagctggaaaaagttccctcatctcagccctttttagattgtcagaacccgaaggtaaaatttggattgataagatcttgacaactgaaattggacttcacgatttaaggaagaagatgtcaatcatacctcaggaacctgttttgttcactggaacaatgaggaaaaacctggatccctttaatgagcacacggatgaggaactgtggaatgccttacaagaggtacaacttaaagaaaccattgaagatcttcctggtaaaatggatactgaattagcagaatcaggatccaattttagtgttggacaaagacaactggtgtgccttgccagggcaattctcaggaaaaatcagatattgattattgatgaagcgacggcaaatgtggatccaagaactgatgagttaatacaaaaaaaaatccgggagaaatttgcccactgcaccgtgctaaccattgcacacagattgaacaccattattgacagcgacaagataatggttttagattcaggaagactgaaagaatatgatgagccgtatgttttgctgcaaaataaagagagcctattttacaagatggtgcaacaactgggcaaggcagaagccgctgccctcactgaaacagcaaaacaggtatacttcaaaagaaattatccacatattggtcacactgaccacatggttacaaacacttccaatggacagccctcgaccttaactattttcgagacagcactgtga

SEQ ID NO: 1155 - protein, 1303 aa, Homo sapiens
VNRWLNPLFKIGHKRRLEEDDMYSVLPEDRSQHLGEELQGFWDKEVLRAENDAQKPSLTRAIIKCYWKSYLVLGIFTLIEESAKVIQPIFLGKIINYFENYDPMDSVALNTAYAYATVLTFCTLILAILHHLYFYHVQCAGMRLRVAMCHMIYRKALRLSNMAMGKTTTGQIVNLLSNDVNKFDQVTVFLHFLWAGPLQAIAVTALLWMEIGISCLAGMAVLIILLPLQSCFGKLFSSLRSKTATFTDARIRTMNEVITGIRIIKMYAWEKSFSNLITNLRKKEISKILRSSCLRGMNLASFFSASKIIVFVTFTTYVLLGSVITASRVFVAVTLYGAVRLTVTLFFPSAIERVSEAIVSIRRIQTFLLLDEISQRNRQLPSDGKKMVHVQDFTAFWDKASETPTLQGLSFTVRPGELLAVVGPVGAGKSSLLSAVLGELAPSHGLVSVHGRIAYVSQQPWVFSGTLRSNILFGKKYEKERYEKVIKACALKKDLQLLEDGDLTVIGDRGTTLSGGQKARVNLARAVYQDADIYLLDDPLSAVDAEVSRHLFELCICQILHEKITILVTHQLQYLKAASQILILKDGKMVQKGTYTEFLKSGIDFGSLLKKDNEESEQPPVPGTPTLRNRTFSESSVWSQQSSRPSLKDGALESQDTENVPVTLSEENRSEGKVGFQAYKNYFRAGAHWIVFIFLILLNTAAQVAYVLQDWWLSYWANKQSMLNVTVNGGGNVTEKLDLNWYLGIYSGLTVATVLFGIARSLLVFYVLVNSSQTLHNKMFESILKAPVLFFDRNPIGRILNRFSKDIGHLDDLLPLTFLDFIQTLLQVVGVVSVAVAVIPWIAIPLVPLGIIFIFLRRYFLETSRDVKRLESTTRSPVFSHLSSSLQGLWTIRAYKAEERCQELFDAHQDLHSEAWFLFLTTSRWFAVRLDAICAMFVIIVAFGSLILAKTLDAGQVGLALSYALTLMGMFQWCVRQSAEVENMMISVERVIEYTDLEKEAPWEYQKRPPPAWPHEGVIIFDNVNFMYSPGGPLVLKHLTALIKSQEKVGIVGRTGAGKSSLISALFRLSEPEGKIWIDKILTTEIGLHDLRKKMSIIPQEPVLFTGTMRKNLDPFNEHTDEELWNALQEVQLKETIEDLPGKMDTELAESGSNFSVGQRQLVCLARAILRKNQILIIDEATANVDPRTDELIQKKIREKFAHCTVLTIAHRLNTIIDSDKIMVLDSGRLKEYDEPYVLLQNKESLFYKMVQQLGKAEAAALTETAKQVYFKRNYPHIGHTDHMVTNTSNGQPSTLTIFETAL

SEQ ID NO: 1156 - DNA, 43633 bp, Mus musculus
  misc_feature (1)...(43633): n = A,T,C or G
aatagaagcagttataaatagtctcccagccaaaaaaagcccaggaccagacgggtttagtgcagagttctatcagaccttcaaagaagatctaattccaattctgcacaaactatttcacaaaatagaagtagaaggtactctacccaactcattttatgaagccactattactctgatacctaaaccacagaaagacccaacaaagatagagaacttcagannnnnnnnnnnnnnnnnnnnnnnnnnnnnnnnnnnnnnnnnnnnnnnnnnnnnnnnnnnnnnnnnnnnnnnnnnnnnnnnnnnnnnnnnnnnnnnnnnnnnnnnnnnnnnnnnnnnnnnnnnnnnnnnnnnnnnnnnnnnnnnnnnnnnnnnnnnnnnnnnnnnnnnnnnnnnnnnnnnnnnnnnnnnnnnnnnnnnnnnnnnnnnnnnnnnnnnnnnnnnnnnnnnnnnnnnnnnnnnnnnnnnnnnnnnnnnnnnnnnnnnnnnnnnnnnnnnnnnnnnnnnnnnnnnnnnnnnnnnnnnnnnnnnnnnnnnnnnnnnnnnnnnnnnnnnnnnnnnnnnnnnnnnnnnnnnnnnnnnnnnnnnnnnnnnnnnnnnnnnnnnnnnnnnnnnnnnnnnnnnnnnnnnnnnnnnnnnnnnnnnnnnnnnnnnnnnnnnnnnnnnnnnnnnnnnnnnnnnnnnnnnnnnnnnnnnnnnnnnnnnnnnnnnnnnnnnnnnnnnnnnnnnnnnnnngcccgtacctaaacatgataaaagcaatctacagcaaaccagtagccaacatcaaagtaaatggagagaagctggaagcaatcccactaaaatcagggactagacaaggctgcccactttctccctaccttttcaacatagtacttgaagtattagccagagcaattcgacaacaaaaggagatcaaggggatacaaattggaaaagaggaagtcaaaatatcactttttgcagatgatatgatagtatatataagtgaccctaaaaattctaccagagaactcctaaacctgataaacagcttcggtgaagtagctggatataaaataaactcaaacaagtcaatggcctttctctatacaaagaataaacaggctgagaaagaaattagggaaacaacacccttctcaatagtcacaaataatataaaatatcttggcgtgactctaactaaggaagtgaaagatgtgtatgataaaaacttcaaatctctgaagaaagaaattaaagaagatctcagaagatggaaagatctcccatgctcatggattggcaggatcaacattgtaaaaatggctatcttgccaaaagcaatctacagattcaatgcaatccccatcacaattccaactcaattcttcaacgaattggaaggagcaatttgcaaattcgtctggaataacaaaaaacttaggatagcaaaaagtcttctcaaggataaaagaacttctggcggaatcaccatgccagacctaaagctttactacagagcaattgtgataaaaactgcatggtactggtatagagacagacaagtagaccaatggaatagaattgaagacccagaaatgaacccacacaccttatggtcacttgatcttcgacaagggagctaaccatccagtggaagaaagacagcattttcaacaattggtgctggcacaactggttgttatcgtgtagaagaatgcgaatcgatccatacttatctccttgtactaaggtcaaatctaagtggatcaaggaacttcacataaaaccagagacactgaaacttatagaggagaaagtggggaaaagccttgaagatatgggcacaggggaaaaattcctgaacagaacagcaatggcttgtgctgtaagttcgagaattgacaaatgggacctaatgaaactccaaagtttctgcaaggcaaaagacaccgtcaataagacaaaaagaccaccaacagattgggaaaggatctttacctatcctaaatcagataggggactaatatccaacatatataaagaactcaagaaggtggacttcagaaaatcaaataaccccattaaaaaatggggctcagaactgaacaaagaattctcacctgaggaataccgaatggcagagaagcacctgaaaaaatgttcaacatctttaatcatcagggaaatgcaaatcaaaacaaccctgagattccacctcacaccagtcagaatggctaagatcaaaaattcaggtgacagcagatgctggcgtggatgtggagaaagaggaacactcctccattgttggtgggattgcaggcttgtacaaccactctggaaatcagtctggcggttcctcagaaaattggacatagtactaccggaggatccagcaatacctctcctgggcatatatccagaagatgccccaactggtaagaaggacacatgctccactatgttcatagcagccttatttataatagccagaagctggaaagaacccagatgcccctcaacagaggaatggatacagaaaatgtggtacatctacacaatggagtactactcagctattaaaaagaatgaatttatgaaattcctatgcaaatggatggacctggagggcatcatcctgagtgaggtaacacattcacaaaggaactcacacaatatgtactcactgataagtggatattagccccaaacctaggatacccaagatataagatacaatttgctaaacacatgaaactcaagaagaatgaagactgaagtgtggacactatgcccctccttagaattgggaacaaaacacccatggaaggagttacaaagacaaagtttggagctgagatgaaaggatggaccatgtagagactgccatatccagggatccaccccataatcagcatccaaacgctgacaccattgcatatactagcaagattttattgaaaggacccagatgtagctgtctcttgtgagactatgccggggcctagcaaacacagaagtggaagctcacagtcagctaatggatggatcacagggctcccaatggaggagctagagaaagtagccaaggagctaaagggatctgcaaccctataggtggaacaacattatgaactaaccagtaccccggagctcttgactctagctgcatatgtatcaaaagatggcctagtcggccatcactggaaagaaaggcccattggacacgcaaactttatatgccccagtacaggggaacgccagggccaaaaagggggagtgggtgggtaggggagtgggggtgggtgggaatgggggacttttggtatagcattggaagtgtaaatgaggtaaatacctaataaaaatgggaaaaaaattaaaaaaaaaacttcttattcttggtggacaagtgaaaaaatctaccaactttgaagctgctgctttactctattttctaggtcaaatgtcccttccccctccagatataaacagtgatgactacctttatgcttcatgacctatatactcacatcactactacatgtatggttctttgctacatgtgtaacacatgcaaaaggtgtttgcttccccatcaacctgcccatcatcttttctcgtgttcttccttttgctaatacatctctagctttagttgggttcacatttctcttcttcatttgaaactaaagtaaccataacaactattttttctgaccaatatgtttcaagaaaaaaaattaatctccagagaacacctgggtcgcaatatccctgcgagagtggtggcaaatagctgaagtccctcagaaagtgccttataggactatggggagggatgaaggcagaacacaggctcatcaggcctgtgtcagagcacagacagaagcagtctcttagctggccttttcctcaaactactctgggtgcttttcctgactagggcatcaccactgtagtggaagggatattcatgcctgcttctgattcctaccagggcattatgagcttcctttcctgaaagcctcttgctttctctaagaactcttcctcttgttagcagtttaatcaaaatttgaattgaacctgacgctaaaatactcacttgcttatagaaatgtctttaacaaggagtaaaccaccagaactcacagactctgtctggcatacccaaagatacagtcagaaatcttatggaggctttggaggcataatactacagtatttcatattacacctagaaagaagagaaagaaaaagaagcagaaagaagaagacacacaactgaagatgtatggtaaggagaaaagagaaatgtaagaagagtcacaaaaggaaaaggttgtactcctagaaatgaaacttcaaaatgctggggctccccctcagagcccttggactgagtcagcacaactcataaagtgctaagacaatgctgttcagttggagttgaagtacatgggttcctttaaccaccctcgcctacctgatccccatgagagttttcacctcacttaccacctgctctgctaagcagatgtaattatcttcccagaagaaagcaggtgcccaggcttctttcatatcttaactacagaatctactgactaaggcaggtagaggggtgcagttagtacagacctgatggaatgcatttgaatacattttaagtattcctgggacatgagatttggacccgggattagcattccctgcctcttattctgtttgttttttccacatcaacacccaagagcaaggtaagtgacttcccaattgtccttatttggggactcttactatatgtgtaaggaatagtttacagccttcaagtaaaaaacattcagacaagtactttttcactgacaaaagctggatggataaggaatgcgtggactcttatctgtctataatggatgggagagcaccctcatagaggcagggggtaggggaagggatagggagttagtggaggggagactgggaagggggataacatttgaaatgcaaataaataaaataagcaataaaaataagaaaaaatgaaattttgttatttggaggaagatggatgaagcttcacagtatctcacatttgtgggaaattaagtgtgagtaggggggttaagttttgtaaatagaggaaagacgatgagggcagaaggaagggaaggaataggaggaggaggaggaagaaaaagtacaattatgatttaaaatgaaaaacaatgtctcatgttttctctcatgaaatacatataactcctacagatacacatgaatggataacatgaggaagggggagtactgtggaaagtaaatagacatggtaataagacgcccaagaaattaattagggtaagtaccaccaacataaagtaatacatatgaaaatgtcatcatgacacccagtcatttatataatgactaaaaaaaatagtaactcatttttaaaagatactcaagtctgagagttttccagaagatgtgttaacattcctaactgggagactctgagtaatatatgccttcctgagtacactctgaatcagtaaacaaggagtactcacttgacgaattcccacagctcttcatccagttttagcatcctgggatctcactaaaagctcagttctcaaggaccacagtgaaaggtttatgtatgaggacagtttacaacacaaaaataagaaccttttctatatgtcttgtctgtttcatagacaccctaaatgattacaaaagcagagacaattccagacacttgcacaaggggtactggaaaatctatgaaatcctccaattctgctcccatacaagatatgtgatcctttctagggattcacatttgaagaacacatgagaaaaggactatagaagaagaataagaaatggaagagatgactgaagagaggagtttgacaatctgagcaaattgctaaggatcaaaaccaaggaataaacccaaggaccttcccttgggtcctggcttctcaggtgcccaaagactcttttttcatcttcctttcaaacaactctgacaaagcagtgccatccatgtctgtcatgtggaggtcagggaggacagataagaaaagggaagttctttgcctgctttcggcttcaaaggatcctacgttaagaaacagagttaccattgctcacccacaatctctagaagtattagtgatgtttctcatttttctttaagcttcccgcactctatttagatttctctctgatgtcctttcagcatctcctgccccacccaaaaggggtaagcacaccagtggaaatcccctgagcaaactagcacatgctgtaccaaaatattatgtcttaactttgttcttttacatcttcacaactaaaggaaagagatacaatcaaaatgatggtccacttaaatgataaacaagagaatttaaagagacatgatacaattgttcaccatggagtgatagcccatgaaaggctgatgaggttggggttagtagatataatacatatgaatttctccttaaacattttcacatagctttgagaatttatcattgtagatttctagaaagcacattcaacttagtgtgcaaaacaggctgattttgcggtatgtttttctgatgaagctttcaaagcaagattacaagccagagtgtaaataattacctgattccccaaatcatttcttttgttgcttgggagaaaatttgaaattctccaaaagaggcccaaaatgcatggcagagatagaatatgctacctccaactgaattctttctctaacatttctttatggattgtagtcaagaacttgatgttataacagatgaaaatcacataacacctctaagatcccctcaacctgaggaggcattttcagagaacagcacaaataatacatctcctttcttttcttattagatcatctcattaagacatgttgagggaagttaagtcaagttgtagtcaaactctaaaactctcaggtactaatgctattcaacctctgggtggcattgatcatctactctaacttagtcattttatagactcaagtaactgattcttccagaaatctagctataacagaagttcataaaatcctatccactcagatgttttgaactccttctattataatcattcttactgcttctttacaaacagtgtgattatgaatcaaaatttaaaaaaaaactgtactctatggtctggatccagatttcttgattccttcaaagaactgaaaaggggccactcatctatctagttatgacaggaccctgataatgaacttaaagaaaataatccaactttatcaaaatctcagccattcttaacaaaaagcaccaattcatcttgaggccatgttaaaaacaaagtggattggcatacaagtttagccacagtctgaataatgactgcctccaacacctatcctacatgccttggagccaataaagtttatgtgaagcctttgttaaagaaaaattgataaccagtatgatgaaactctcttttaaatattctgagattgtacttatgtagctgtttagagatcagaagttttctaaagtcagatggtgtaagttttactatttatatatcatctctttgcccactcatctctactatatgtatgagaacagctgcagatagtacacaacaaatgggtaacattggactccaacaacgaattacttatgaaagaaggtaaaggatcaaattccattcctgagtcataatttgccaacacttgcatttaataatttctccgtgcctgtacttaatagttaagtacaggtgtatactagagatatatagaactcaaaggagaaaaatggctacatttgtacactgaaagattgagtgtaaaaaatatttttaaatgatcttttaatagcttatgaaagatgaaatctttattttgtacatttctttgtttttagaaactgtatatatgtattgaggatattgaaaccataaccaccctcctgtcttccctacctaccgcattccaacacctactctccttctcagtttcatgtcctctagttctttaattatccagactccatatccccattgctaggagtcgtagctagggtcaccctcatagactcctgggagttttcattgcccttgtttctagctagtcccagagatgcccatctcctgtaaccagaaaagacttccaatggaggaactgggacaccaacccactcacaaaatctttagctcatagtttgtcctacctacaagatgtgcgggcataaaagatgaaacagaattagagagaagggcaaaccaatgactggcccagcttgacacctatgccatgagagggagcccactccgacactcttaataatattctcctatacatgcagacaggagcctagcatagctatcatctgagaggtttcacctagcattgatggaaacaaatgcagtgacccacagccaaacgttaagtggaacttggggaatcctatggaagagagtgaggatggattgaagatgcccagaggggtcatggtcacattgagaaatactacggaatcaactaacctgggcacataggttttcatatagactaaactttcaaccagaaatcatgcacaagacaagcctagaccctctgcacatatgtaacagttgtgcagctgggtcttcatgtgggactcctaaaaccgaagccagggctgtctctgactacattgcctgcctttggaagcctttctgctaactgggctgccttttctagtctcgagagaagaagatgtgcctagtcttactgcagcttgatatgtcaaggctggttgatatccaagggaggcctccccttttctgtggagaaatggaagaatgttagagaaggttggagggaagggagaaagagggattgggagcaaaggatgggggggggggcgctgcagtcagaatttaggataaataaataacttaatcaattcttaaaatgatttaagaaaaggatccacagaacctacttagttcagctcttgtgctcatgagtgtataactgcccactagagcttgagcaacctaccatgggacacacttttaaagaaaactaactcttaatcgcctggtatttgtcaacctgccaggagggcctcagctagggatgtggcctcttgaacacctgctctgtccatattggaatgtggattggtgtgatctcatgccagtcttgtgtcacaaccatagcttctgtgaaattatgaacacaaagatcctattatttttataatagataatttcactgtatttctctttggctcctgcctcttctgatctttccttctctcctccatggtgttccctgagttcttgaggggagtgtttcatggctggtactataaatctgaccacgaacccgtgccagggaggtcttagagcataggggaaaacacaggactattgtttgtttaaaagacagagtatcaaactgtcttctagacatttgtccttatacccatagaatagtgcagccttgcctctcattagagaagctcttttctcacttctctctcagagagcagagaactgggcgtgaccattgagggttcagccctaagtgggacaactctatcctagcatcattattcctaaaacaagagcatccccaaccaactgaggagcatcgtaagtgtggattttggccttgtgatcctgttacattggaccctgagatcatctgaagcatcacttgaagtctaccaccttgctcaaaagtaagcagttaagttcaggagcttcagggaataccaagatgcaggaaaaaaaaaagtcacactctacctctccgttttctctacctctgcttacagcagcaatccttttgctcagacttcctgtttctggcacttgccttcttctgtgatgttcatagttccctgtctgtggtttagcaggcacagagctggtttgggtctccctctctctcattcacttgcacatacaagcgtgcttcttctctattctttctctctctctctctctctctctctctctctctctctctctctcagaatgatggctctgggtagagctttcgctatagttttctgcttaattcaagctgtttctggagaaagtggaaatgcccaggatggtgagtcatttctaactccttttttaaaggatttcagattacctgtagcatatatgatcaagttacacagttctctaacagggcaagcaagaatttagcactaattaggttgttttgtgggtattaatcaccaggacagagggaatgatgacaatactgcaaatggcttgtaactctcaagaactgtcaagaagcattgagtttcattcaaattctggctcataaatgtggatgtatgctggtaatttcaaaaaagaaacctcatatcagttctttgttggagctttttggatgatcgcttccaaaactgtattagactgaaaaatcaagccattgttgttttgactgtttatggagttctaaaaccctagatacccatgataaattaatggccagaaacgagaggtttgtgtattcaccaaaactgtatttctagtgtctagagtttagaagttactctataatgtatttcttcaacatactttagctttggcagattcatgttagattgctgatgaataattcagtagtatgctaaggaaggtgtcttctttgaaatacacagggttgcttttatattcagagaatccattatatggtcatcataattctcctcagaatccataaaatacttagaccttgacttcttaaaaataggcattttaattacaggactgtactcaaacgtctctggcagacacagcagctacatggaatgtgaatctccaatttgtttctacaaattaattaaactgttttcatacacacacacacacacacacacacacacaccattaaaaggggaatgtgtgtgtgtgtgtctttgtgtatgtgcgtgtgtgtgtgtgtgtgtgtgtgtgtgtgtgtgtgtgcatcctgcctctggttcctgagtgctaggattaaaggcagacaccaccatggctggcctatatgtgcattcctaaactgggtgcagtagtacatccctgtagtcctgaagcctaagaggctgagacagaaaaatcatctttgttccagaccagttaaagctacattgcataagcttgtatcaaatacatctgtattttctttatgcacagtatcaatacacatcagcctagctctgtagtttagctcttcagtcaaatgcctttagttgtgcatcctaagcttagatatttgtgtgactttactttgtaatcagcaaggatggaaaacccttgcatgttcttatgaagagaatcatcagaggagtcacactcttcagcatgacggagcatgagtcacttggtgagggagagtcattatctcatgttaaatgtgtgcaaatagctggcaggaagcacgagaaccatgctgctgtttggtacaatcctttgcccctatgcttccctcttggccatgctatttcttacaaaaaaaaaaaaaaagtaaaaattcttgctgttaaacaggattttcacttcacctttttaaattttgaaatgtttttagattgatgatcataaccacccatatgcgtcacataggcatgtcacgatacctcccactttgtgctggcagcaatctactagtcaattttctagtaactaaaggatagtcaaatcaagcaaagggaaccgcaaaagccctgacagttcaagctcttcatcaagtaatcactgtcttctaaatgacactgccttacttagaatatgtattccaaatgctttaaatttctatacctagaatttttacttaatgcttagatgcttcctattgaacactgtgaccattgttccacataatgtcaaaaccacagtaagaataaaagcttccattgatatactacaattttttttcaaaaaaactccaaatgctgcatgtatatttgcataattataattcacatattgcctttcatactgatttctccaagactcctgggagagctctcacccttactgagaacttactgtaatgtaaatgaaacctctgtgcaaatccatccagtggcttctataatgtgtgtgtgcatatgaatatgggctttgagtgtctgtgtatgcagtaagagagcccagctacaaagttagaacagcaaagatcagtatgcatatccactctcagctaagagctctttagctcacagcagatagaatattctcccacaatggcatgtgactttcccccactgtgggttacagagcaattgtgccccagtagcaacatctgctaaagggtcaatggacaggtcattcagagacaactgctttgattgcggaaaacatggcgtgatcagctttttgcatattgtgtgagatagcttgagacatactttgtcagactgggtggctgaagtgtatagaggtccactcttcagctggtgtctgtcatctgcttaaagtatgctctctttgtctcctgtcataggtggaaatgttaggtaataaagatgaaccacaggatacctaaatccaaacagtaagtcatatctgttacagagagttggttacaggcacaagcaaagcacaagacagtatgagagctgagagctgtcatgtagggacaggcaacaacttctaccatacatcaagaaacttgatgatgggcctagtcggccatcactggaaagagaggcccattggacttgcaaactttataggccccagtacaggggaataccagggccaaaaagggggagtgggtgggcaggggagtgggggtgggtggatatgggggacttttggtatagcattggaaatgtaaatgagttaaatacctaataaaaaatggaaaaaaaaaaaaaaaaaaaagaaacttgatgatgttccaactgtgaaatgctaggctcttggaatgcctaggaagttaatttcccatagctgggaacagtcaccccagtctatgtttaggtgagctctgagatctgttctttactactgtcacttacctggttggccttttattaacccattttaattaatctttattaaaacagacctttggggtgtattagttaaagaggatgcaattgaaactgcatatagctgctaagccacccatctgaggccatggttagtacatcctgtttccatatgagaaccagaaaagtataatgtctctattttgggtgagattaaatacctagaagctgtcagaggctctctgcactccaccatcatgatataaacctttgataactctagaagattttccttgtccttattgaaatgcatttcctggaagatttttctgaatttttctgctaatatatatacacacatatatataaaacaccatatatatgtaaaaccatatatatataaaagatagatttttgtatacatgtatatgtgcacactttatgtatacatatgtatatattttatgtacatatacacacacaaatacctatttaattatgggctctacaagtcagcttaggaaatcaaataacatctttgacaaattgcagtcaccaaaaatggctacacatacaaaaaatttccatttcccacttgcttctagaatattactgatatgtgtagaatacagtagctgaaacaatctaaccatgtaggctaaaacctttcacccttggagttttctgatctatagttgcctcagtaggtcacttaagatgctctctgccacagaatggagtcatcaatattactgttaagttacaatgtccttttaggagacaataagcaatcccataaaaatgtgcacttggaaccagaatcattattgtcacctttcatttgaaaaggaacttggaaaagaacaaatgaagaccagcagagaaaaccaacattagattaggtggcatacaaatgaaatacaagatcccttatctgaaatatgtcaacacttcagtgtaaaaagataatttcaacattttaaagtctcactggggatttgttcattaacatttagcaccttctatatatgcgaggcattgccttccctgaacatgtaagataatttggctgaagtggagaatataatctcacataaatactttctaaatacagttttaaagtgtagcaaaggagctccaatataaacaaggaaacgggtttgtctatgccccttataattttccaacatactagtccaatgtagaactgtttaaatatacctggaacttgttcctccactatgatgatttctttttgttagaacactttgtaatctgtatgtgcacatcgggtttggcatatgtgtttcaggtatgtgtatttgtgtgtgtgtgagagagagacagagacagagagacagaggcagaggcagagacagaaagacagagagagcacattgaaactttttttctgtccttagaatatcttcctttagataaattatatataggtatataaatatatcgatatatattctctccttcatgtctgccactcaagtgacattttattaagggaatcagattttcagctgatacagtcatttgccttttctccttaacagctgtgttttgttcttctcaggagacctagaagatgcagacgcggacgatcactccttctggtgccacagccagttggaagtggatggaagtcaacatttattgacttgtgcttttaatgactcagacatcaacacagctaatctggaatttcaaatatggtgaggaagatagtttccatggtgcttaggaatccatctcctgtctctctctctcgctctctctgtgttccttccgggacttgcaaaggaaggagtgtctgtcctaagtatcaaactctaaaatttcctaggttctcaaaactttctgaaatactttgtcctttgccagaaattaaagtgaggcaactctcaattcattttttagttctcagaggcatatacaaatggtggtttgatcttggaaattctacatccctccatattcacagcaatctaaataaacacttcttctcctagaacactcccttaaggcagtgctctattttaaaattccattatgcagcgtaattacttgccttccagtcccaatgccaatgcttaataaccttttgacttgcagcaagttatgtaacatgaattctttagtttcttcatttaaaaaataattgaatgactagatctcacaggaaggttatggtgattaaacaattaaacaattaaatatatataaagagctcaaatcaacatccaatatttaattagtaatggagaaaagataattctgtgaatgtatgtataaaaatcacccacactgttgaaacagttgaattccagactatctagtcaatggaaaatttccagtaatctataggaccaagttgattcttgttttcatatggccctggaggaaatcaaagtgcaaagaaagctttaggtctgaaggttgataaagaactcagggagttgtatcttcttcctcccccaccagccatcgcttgttgccaagggttattatctctggtgacttgaagaaaaaatactctaatatgaaattctggcttgtggctatttccaaattcatatcagatgacctcattttttggtaagtttccatataaggaaagtatgtcgaggtctgcagtagtaaaagaggacttctgaagttccatgagcgctaaggaaatcctttgccgcctacaacccagataagctgtagattctcactcttctgaatctctagcagtttcctgaagctatacacaaagttttcctgaagtcactggaggaacaacgtcttggagttgaatgtcacagaataccctcagtctgtctttgttattgtatttttgtagcacactttctatggagaacaaggacacaaatatctaagatctagagatatgcctgagtcagtaaatgtcttgctatgcaagctggtggacctgagctgagctgagctgcctagaatctatgtaaaagctcagtgttgtgtctgccaccccacccccgagttgtgctgcagacaggggttatgaggatagatggatgtgtgagctttactagctagtcacgctagtccagccaatgagttccaggttcattgagagacactgtttcagaagcatagtgtgaatgacagaggaaaacccaagacattggcccacccaatgtgtgtgaacacatgaacacccacaagcatatgtatgtgcttacacatgtgcgcgcgcacacacacgcacacacacacacacacacacacacacacacacacacacacacaatggacatacaaacataccccacaatcaaaccaaaacaaaagacagatgttgagaatcattcctacaacttgataaataagttaattaactcatctaaacaatgttctcagttcttatggaaaaaaaaaaataccccttcacacagaggtttgactccgggttttcccacccggttcttagtgagctgtggtgagcactgttgtttcacttgaccaagccacagctgacctttgtgtccactttcgctcacatattcaatcatgttcttgcccactgtaacaaacttccctttagtgttttcattttcttttacatatactagtctctccagagcttcttcacattgttttccaggtggacagatatttgtttagaaagcctgatttaataggtgtgtgtgtgtgtgtgtgtgtgtgtgtgtgtgtgtgtgtgtgcacgcctgtacacacgtcttaaggtatacaatgtggaagaaaaggttgacatcaaatagctcaaaaagatttctaaatcactaacatttctgtgaggcatgcacactttcagtgggacatgtatgaaccttctaggttgagaagatgttaatgaaagagttccgaatttgtgtgtttcttcttctaaagggtactagcttttgtagaacatttgttgtctcttaatataaatgtatgaagtagaagttgggatttgctgaatttgtttatacaggtgattactggtagatgctaggacccttctctcagaatgtggtaaatttaacatctgtcctagatctggacaccaaactttggacaagaaatggactgtttggtttttgtttgtccatttgtttgtttgtttgtttgttttatttttcagtgaactgatctttggggagggaccaggtcaacaaagatcacagatatgaattactagtataccaatggactagttcacagtaggagataaaattattatgaatatatgaatactcattatgggctctggtcctgtaggaattagtggggaaatagtgaagagggtggaaaagtccagcagattacacaatagaataatccacaattatctaggggaaagtcctaccttttcttcactgaaattctagtcagttttctggtgcattagacaacaaagcagaaactctgaaagaggtacctgggatggaattccaatactaaagctaactagcccagtgaccagggagatattcagaccagcatcacagcaactgacttacactggattacatctggttaatgcctggcatgtgggaggtacctgtaaatggcacttgactccttcagtatgaacatttccacataaaataaatataggggaaaaagcaggggcaactatctgctacttttactaccaccaattggacaatctctcagtgcaattcacataaaaatattatttatcatcattcaaaagtcagatatgtcttttgggggggagctcattcaatttctatcactttccacaaaagcagtcatactctgttccacgttttctgggccctgatattactgccacatactacctacaactttgaatatctcactatttttctccatgactgtcacctttacaggccagctgatgttataccccttagcagtgatatctatcaagtattgttaagtattcagtcctctggacagtaaattatactatctctctaaattgttcagtattttcaagccatatcctgtctttcagggccatttttgttgttttgttttgtttgattgattgattgattgattgatcgatcgatcgattgatcgatggatagattttgttatattttgtttttctgccattttttcccttcagtctgaacatctgtttatataggtaagacaaatgcatctctcatactaaattgtacaagactggagaagaaagagaaaaatggaattaaaatttaggttaaatgatctttagccatcactctctacattcagaaccagatttgaaaatgtgacttagggccagtgtcccaagtcatggcatacaagatcagaatcatcaactatatatgtattacttgagtaataactgtgatcttccattgtcacacatattctagaacatctctagtcaatataaatataatgcagtccataaatctatgagcacattggtcattttaaatatttttaaattatatttttaataaatttagtgtttgtgtttgtgtatatgcatgtatatacacaaatgtgcatgcattgatgcacacgtatgtacgtgtgtatgtgtgtgtgtgtgtgtgcagaatacaggtgtcaccaattctctctttccattataggagttctgtagattaatccagagtcttacccactgagttatctggcaagcctcatctagcagcacatttttttcaaaaaatataacaaaatgaagttaattataacatgtgttatttaatttgatacactcaaaaattatttcaatatgtgctcaatataaatagtatactcagatactttatgctctttttatagaacatgttctaagggtacagtacatatacatttagaccatattgtaatttggactagccatatttcaaatgttttacaaatacatacaggagaagggctattgtgttggatagtagagattcaaaccatcactaagtcagccatctctaagacagttaaccaaataaatgtttgtaactgaactacatactcccactggtgctgataatgagtatcctcccactgtgtaagtaaagtcagtaacacaagcgaaagttggccattgtagtcagcttgctttactttaggtgccaacgtgacatataactgaatagtatactcatttacttaaaagatgttttaaatttaagtattggcataaagcccactagcctctgttctctctacattgcacaggtaccttgagctcagaaattggtatttcccccaatgttctctgtcacttctgttctaactcagcaaatcctggcagtatttctattaaacggttgttggtgacagacttctgagcttttcattcatctcatatctgtccacttgtatgtagttactatgttgcttttcagtttttactattttctgaacgatacatttcagggaggacattgcattcaatccacacacagagattctgagggtgtgggcttttgaacaactctctatcctgtcagtgggaagggaaggagacggggggggggggggaatagagggaggatctgcatgaggggttactaggagagagggaggctgatattgggatgtaaggtgaataaatgaatttaataaatataaaaaattaaattatatatgccaaaaataaacttacaatttcttcccttatctctagttttaataattgcatctggttttgacccatgtctaactttgccaaagctatgacgatacctttgtcttcctgtacaaagataggacaagagctatctaataaggattgaaaatgtgtaccatattcattcagtgatttgctactcagtagttataaagatgggatataagaaaataagcatcatctagaatgtaactcctaggcatgtgaccaagcggatgaaatcaagtatgaaagaatagtaatggtattgcattgctgacaaccactaccagctggaaaaactaagatgtggtagaagggagaattctggttcttccttaggaatcaggttaactgtcacacgctcaaaaggcaactgttcagtgtgaaagaaaattttgtaatctggttagttaataaacagtcacaacttggaaaatcttttaaaaaaagaaaaaataaatatcctataggtagaacttgactgatgtttgcatgtcatacacatttctcaaaaaccattggagatggacatattttgctacatgcaattccctccttcacctttaaaccctgcagtgaacaaagaagaaagtaggcaaggttaagtgagtaatgggggaaaactaaagaaataatgaagtcatgcattcttgctataaaaataaatgatacaggataaaaggaaaagtactagtttattctcttttcacaagttttaagtttaatgcccttccttttgaaatgtgtccttgtgaacttgttgcctgcatgctcttttttcttcaagcccagctaagtcatcctgaaaagaggaaaaactgggatcagttagaagtagacatcttgacagaatgcctctattcaagttgcttatacaaaatgaattcttcctactaatcagatacatgtgagtgtgtgagagtgtctgtgcacatttgtgtgtctatctgtgtgtctgtatgtgtgagagtaaaagacagtaattatgtacgtatctgtctctctgcctctgatgcccatccccgtgtgtgtgtgtgtgtgtgtgtgtgtatgtgtgtgcacatgtgtgtgcatgtatgagcacatgtgtgataagtcttgggaacgggtttggtgatttctttggtgaattgcgtgaatgtgcttcttttggtatatgttcaagacttggttactataaaaattgaaaatattatcttttacattattttcctatttttataggttaacctttagattttagatatatataaaattgtgtagaattaaggataatattaatacactatggtattcagagtcacctgtgttcattctattttttcagtgatgttttggtttttctgtattttcaaaatattgataaagttttgattagtatataaatctgttaggggaaaagctctaatttatcaataacaaatttgctagcacatgaacatagctcccatttatgtaaatttcttcaaatacctctttgaaatgttttgtaatttccagtacaaaggccttgaatatcctttataaatttcagttctaagtatttttatcctctactactatcacaaaggaattattatttttaaagttcattttctaattttgtgatgctatccatagaaatacagctaggggttttctggtagctttgatgaattcaattatttcctataattatgttggcagtctttataaatgtctatgtaaacagatagggttttttttctggaaataaatgtgctttctacttttcaactatgcttatacttgcatttgcttctcttctcttctgaattgaggagaacctcagtgtgctgcagtatatgagtgtacaaagagaactgtctcccttgccctgatctttacgttatgatttatattaaatttttataattgcatttgaataagtgtctttattctgtttcttgttgtttgggggagttttaatcatgaaataatatgtgattctatcaaaaattctatttctatgaaagatgagtaactttctagtgttttattctgttaatgtaaattatgccaatagatgattgaatgttgagccagctttgttttcttggtactcaccacacctgacataatacagtatgattattttgaagaccataataatacattttttgaaattattactctttaatcttttttatagtccagtcattatccccccctccggtccaccctctgacagttcctcatcccattcctccccagacctccccattccttggggcctcaagtttcttcagggttgggtcagaccaggccgttctctgtttatatacacatttttaagacactgttttatgtcttatgctggctcagacttactaagtggatgaggatgacctcaaacttctagtgttcttccctccatattttgatcattgtgattacaggtatattctgccataccagatttatgtagggctttgaggaaactaggtaagtattctacaagggagtcatatccccagtcctatgcatacagtcttgagggatggttttctttccagcattttgtaggtttgggtaccaattttaaactggcttcacagaataatacagatcatctctatttggggaagaaattcaatgatgctggtactgtatctttcttaaccatttggtagaactcagcatcctgaagtcctcaagcatgtagaattaactgtgagggaagatgttaatatccatgtgacttatattgtgacttagatagtttctatgaggttaagttttaagaatgttttcactttaaaaaatttacattcactctcacaaattgacgtatttcctatagttttaatatctatatgatatacaattgtgtctcctctgacatttcaagtattgttaacttataattttatacccatagtgtcatagaagttctatgtaagctgtgctggactcaaacccacagcaatccttatacttagactctcaaatgttaaggttatactcatggtccaccacacagaactttgcttccttttcttgacctattgtgttcagtttcattagccaaagtccgtatgaccctaggcatggtaatacatgctttcagcactatgttggatctctgtgagttcagggccagtctggtctacgtgatgaatttgagggtatatataaagaattctgtctcaaacaacaaaacacaacacaaaggctctatggaaacaccttgatttatttattaaatatatgtagttgcatatatacctcttcaaccaatttagcatttccgttcatcttatttgaagggatactatcaacatttctcacagttatcatacttttcatttgttcccaagagacgttgattacatttttacctaaacaaagtatttgcttctgatcaattctaaaactacatagatcttgctcttaatttccacaagcatgctttcaccacttcagacttatttgcacataataattgtgatagaacagaaaactgtgttattttaattcactctcgttttcctcctcaccattaacttgctgacttatgtacctgtagacactaaaattgaattcatacaactaaaggcacaatgttattttaattgtatacagaaaatcctacctaaatgaagacataactttttgtttctacagtggggctcttttacgagtgaaatgcctaactcttaacaagctgcaagatatatattttataaagacatcagaattcttactgattggtagcagcaatatatgtgtgaagcttggacaaaagaatttaacttgcaaaaatatggctataaacacaataggtaagaagttgtatatgatggtgtggtctctatggtttggatagctgcataaacgtgtctttgctttcagaatgataaaaatatgcaagtcataaaaacactttgtaataaacatgagcaactatttttgctcatttttaagaaatgaaaatctgatgttggaatcatgagttccttctgtgagaaaatatgctgagactattccaactcagctatgaaagagtgtctgacatcggtatgaggaatattgctaaagcaggccatctacctcagactcacatgtgctttctttttgtcattcattcttctgaaggtcttgaagtcttttctccatattcacatcatattccaaatgtgtatagctcattaacaaatcatttaaaaatatgctttccatgtttttcaaagttctacaagtgaaagaaaacttatgggtgggagataaatggatggatatttaagtaaatgataaatagattatatgtaggtagataaatcaatggatgatagatagatagatagatagatagatagatagatagatagatagatagatacatagatacatagatacatagatacatagatacatagatgggagacagattaactttaagaactgattcatatgattgaaacagtggtatgtttaaaatctttaggataagctagggggtataaatgcaggttaagtgtgaatgtttcagaactgagtccaagttcttaatgaaagaatgtattgcattcttgaatcatacctgtttctaataggaatttctacctttaaactaaaggtcttttactgatcagataatgcctactgattatggaaggtgtcaccccaaatctactcacatacattttaatcgtatcttatcatatctttttttttttttgtttttgtttttgtttttcgagacagggtttctctgtgtagccctggctgtcctggaacttactttgtagaccaggctggcctcaaactcagaaatttgcctgcctctgcctcccgaatgctggaattaaaggcgtgtgccaccaagtccagcttaatcgtatctttaaaatatcatttgattattgttcaactttttaaaagtaaatactatagcatagccattatgacctataatataattatatttccaatgagattaagtgaggaatgaaacagcataattgatttgacctagaatacacataattatattctgttaaacataagtagtaaaagcagttatattttaggttaaattataatttgaattaatgcaatgacatgttaactatttgtatttttctgcctttgggaatttacaagtgaagtttatatgagaaagcattaagaataatcacataaatgcaagtttgctgattttacaggctataaagtccctcccttatcaatgtctctttcactactctaaaagaaaagacaacagagctattctcactgaatatgagatacagtgagaaagttacttcatttgtttaatgattatggtaaagaaaaaatagaagttccatgtctaaacaatatcttagggaaagagcagaagtcacagaaatgaaatattcaacaaatggctttacatgttgaccacataatatcagcatgagctaggctgtcatgaaaggcagatgaggtaaggattccaatgtacaagatctctgggttttgagcataaacacggtggtgtttactcatttggagtaattatggatcagtgccgaatgtgtgcactacacaaaggtaccatatttaaatgttcatcgttcatagtgcagaggtttatttcttggagagtgagcagagagggtaccagttcttgatcctctaagaaaacactgcaacattgggagaacatctgttctcttgcttacattaggccatctaagcacacaaacttctgtaatcatgggaacacatagagcacacccacaggatctggagatagccaccccatccataggcccagctataccaaaatacctagtgctcatggaggaccatgtagcatcttccacatcagaccttaagactaccctcttatgtgaggggcaatgaggggaacacagatccctgtgaaaatatggtgtgggtccctcaggggtcctagaaagtacctgcactcctgagcaagtgggattaaaataagaagaatacttctcataggattatgtcctcctagttcttcaggagacatctcattcactgaattatcctttccacaaatttaaactaaatgttcctgattaatacctagaaccagaatcctagtcacctgcaactttctctcccacttccatttcttcagggacccctagcctataaggctggaggcctactttcctgccttcctgatttgttttaggcacattgataaaactgtctgggaccaaagctggatattacagcctggtacagatgttttcttagagaataaatacttttctctgggtttgggctgaatgatgtgacagttttctccatccaggaatgtatcttccaggacaaaatgcttctaaacacaactctgtgagacaggcagaggcctaggacacaaattggtttatttaactaaaagtgacaaaggaggacgtctggaggccactctggaatttgttagtcagggctaccatgaagactctacactcatttgtatctgaggtgaggtgcagaggtcccagatatatatatatccttgcaattctttacttaggagcccattagtaacacatcccctggtattccgatgtatataagtgatgatatttattttatgactatttaggacttcctccacatggtgacccaaccttctttcccataggactttagtatatacaaagataccaagataaggattatacatgggaggatttggtgccaagactggaactggtacctttctatctactcacaacagaaggctactccagccacaggaagggtctgacaatggtgtctggatgagaatcaaggagaaagatttggctttgttaatgaccagctccgaagatagaaagctctagggggatgggtttcagagaagaaggactttaaaacgtgtagttatcagcaattaatgaaaaggggttatgaatttgatgaaagagaacaaggaggctatctaggaagatttgaagggaggccaggaaagggggaaatgacataattacataatttttaaatgcacttatgtcctttttaaccccatacacagacttcatttcatttctttcttcctttctttttcttttctttctttctttttttatttcttttttgacagttaaagccgaggctccctctgacctgaaagtcgtttatcgcaaagaagcaaatgattttttggtgacatttaatgcacctcacttgaaaaagaaatatttaaaaaaagtaaagcatgatgtggcctaccgcccagcaaggggtgaaagcaactggacggtaatgtaaatcaatcacgttcacaaaataagtatcatcttgttctgttctcagaacttagccttcacttagagaggtcccctgggtcctacaccctcaggaccccaaatctcctgcatctttcttggctcctcttcattaaatttgctttagtttatctttatggtttgaacttagataagaatgtatgctcagataaacctgatccttgctctgcaaagcctccagtgtatgggataatcaggaagaaaagtggttctgcgtagcataaccaagaagtagccatgatttttccctaggacttttggggacaacaggaggtcagcagaagaaatcgtggaaggtttttctgtcactgttttttacgttaatgtctaagcattcagttgcagaaggaacggttagcttttctgctctgcgttttctggaggttaagtgaactccctcatggtctgctgaggttaagatgatcttgctggtcttaccatctctttgggagagaaacagaggatcctgggcacttgggattctcttagtctgccagatcaatctcagccctccctgtttcaaatagataaatagaagatggcttctctttctgaagaacaaaagaatgctcacatatgcccgatgccccctttactcagcctgggtcatcgttcttactttgcagtgtgctgaggcatgctacttacagatgtgcatttccatccaagccatctgctgtctttctctacctactccacagccacacacaaactggatggccttcatcctaccttctcccatccattgtctgactatgccaccagtggaaaagcaacattagaagaagaaagaagggttatgaatagatggttctaagataatcagcttactgtctgttaaaaaaagtaaataaaaatgtctagactctactggaggctgatttatgtcaatatacacaaatacaattgtaagtcaaataaaaattagtattaaactaccacagaactgctaacaaattgtctgtctatgtaaaatcattagttcatcattaagatagagacaaacattccaacaggtgaatgagccaaaaacttagaaaactgtcataactataaaacatataaattcagttaacatagtcaaatagatataaataacaatgggatactaattttgtctataagattaatataatatctttttcttagaaacaatagtgttggaaaaatcatgactttatgattatgtgtggtgtcaaatggcatctttctggaaggacatgactagtgttcactgcctaccctttgtttccctgtggtgcatggaaagagatagaaagaaaaaggagatgctggaacagaggagatagctgtgaacctaggagggggtgaaacccaccaaagtgagaaactaattcagctgagtacaaacccgtctaatcagtgttctctgacctcacctggtatcatttagagcctgcccccgattcggctgctgaacctctatagagctcaactccttcatttaagacatgaaagaacttccagaggctaccaacatgactgaaagccaacatgtccttttacttctaataacataacttctttttcaccctagcatgtatctttattccacacaagaacaacaatcccacagagaaaactacgaccaaaagcaatgtatgaaatcaaagtccgatccattccccataacgattacttcaaaggcttctggagcgagtggagtccaagttctaccttcgaaactccagaacccaagaatcaaggttggcaaagactgtccaagccctgtaccttccacaagacttcatattctgaagtgtagcagagagagggggaagaaatcagtgtaaataacccacaggtcaggagccctcttctactttctttgaagaatttttctgcctgccacctttgccatttttctgggaggagagcagtggcagctgagccatagtgcctgataatggataaagattgtcctgatgtcactgtctcagatgctcaggaatctactaatgaatctgcatgaatttcttacacactactctttccacctttgtcaggggtcatggctgatctctctgtgatccctctaggtaataaatatctttactactagaaaggaagtgggtcagtttggctatccattacatctcttttcccagaacaatgaagatgctatgggaaatactaacacccagagaagccagagagcatgcttcaggacagtacccaaagcaacttacctaaatcttctatttgaggggaatggaggttttccctgctgtacctgtgccctactttcattctggaattttctgcagcttcggggtgaacatttatctctttttctcttatttagactttttcccccttggatatgggtggttggataaaggtttctgggccatcatgaaaggtcatctttacatttcaagtagctgatgttcttcccactgtcaccgagatcagctcaactctttctctctatcaaagaactgtttctaagaaacaataagtgagacatgttattaagtaaaatcaaactaccctaaatatatacccacactttatgcttactgaatgctaaccgtgatctctccttatattccaggaggatgggatcctgtcttgccaagtgtcaccattctgagtttgttctctgtgtttttgttggtcatcttagcccatgtgctatggaaaaaaaggtgattttctttagtaaacaagagggttatttgtggagccccagaaaagcaggactcaggtaccatctagaaaagtttaaaataacagacttgacatttcaagaattatagtagcaaatatatgccctcctatttttagatcccagtcaatttaccatagttgatttcagaagaggcaaaaatatacaaactagacataagacaaacaatattgcacaaatattaatagtgtgtgtgtgtctgtacacatgtgcatctgtgcattgcatgtgtttgtgtatctgtgtctgtgtatatacacatgtgtgtgtgtgtgtgtgcgtgcgtgtgtgtatatgtgtgtgtgtgtgtgtgtatgtgtgtatgtgtgctgggtctgtctgtttgtttatctgtacatatatggttgtgttcatgtgtgtatacatgcaaatgtgtgctggcctacaggcagccaaactcaacacatattattttattcaattatcttccaccttgtctcttgatgcagggtcttccactaaacatgaaccttaccacccctgtcagattaattggtcagtaaactctgagtatctgtctgcctccaccactccacatatcatagagttacagatacatgttatcatacattgctatccaaactcagttcttcaaaattgtatgacaagaggtttatttattggattatttccctaggccatgacgcccccccccaaaaaaagaattctttaagaagtgttttccaaatattttttccacagcctcctaaaggacttagaggtgattacccatgctaacatggagtctatttgatctcatgactttctgcacacaaattcacatgatttttgtattttgctctgtggtagaaccatgccctgtgaattactcagtgttctaggaagttgccctcggcaattttgtattcctaggaccaaaagtgctctaatttgaaaaacgctaccataaaataattttcttgaatagcttagaacgtattcccaatttccactggaattaaagtaaaacctttacttccagtaaagacagtggataagatgacaataccaacagtgagcataaaagaccaggtctcattgtagctccatataaacaccaatactgcctccctgcaaacctcactcttcgctttagggtactttgcaacataattacattgtctcattcacaatagatcgttagcaaggagctctgttctatccactccttaaaccaagagcatgatactgtcagagaaaataaggtgtttgtccagtaacagaaatgttttcacaatctacctcaaataaggtgaaagagttgtttgtgtgccttctccttctgccgtttgtttcaagtatgaatgttctctggttttaggattaaacctgtcgtatggcctagtctccccgatcataagaaaactctggaacaactatgtaagaagccaaaaacggtaattgcttgaggtggggaaagaaacaccataatgttgaaatcttagtctaagaatgattaagactgacactcaacttacggtcttttatatatcacataaatgaaagtccttttaagactctgaagaataaagccaagatatgccacagggcagggggttggggaaaaatcaatatttacttcaaagttggagtatcacagctcagtcagaagtgaagccaactgtcattttttcacatcgtgtgtcaattttacaagaaagtttcgtaaacgttttagtttcctgaatcaaatgtatagcagcgcctctttgccacgcctctaacgcttctgcctttctctgcagagtctgaatgtgagtttcaatcccgaaagtttcctggactgccagattcatgaggtgaaaggcgttgaagccagggacgaggtggaaagttttctgcccaatgatcttcctgcacagccagaggagttggagacacagggacacagagccgctgtacacagtgcaaaccgctcgcctgagacttcagtcagcccaccagaaacagttagaagagagtcacccttaagatgcctggctagaaatctgagtacctgcaatgcccctccactcctttcctctaggtcccctgactacagagatggtgacagaaataggcctcctgtgtatcaagacttgctgccaaactctggaaacacaaatgtccctgtccctgtccctcaaccattgcctttccagtcgggaatcctgataccagtttctcagagacagcccatctccacttcctcagtactgaatcaagaagaagcgtatgtcaccatgtctagtttttaccaaaacaaatgaattataagaaaacccttccatcgacaaccaaatgatcactgagatggaaagtctggaatgcttgctctcccccgtagctcacagaagagaaagtcaacgtgaccttgctacacatcttcagcattctaagaaatcattttgctcttctagctcagaagcatttgcacaaagcaggaagaatctgttttccctgttgttggattagtcataagagtccatatgacccaattaaaattgcaaaactcagttaagtgaagaaagaaagatagacaaaagaagatagaaggatgtggtgaatgcaggaagaagaaaatgaaagatgtgagtggtgggtctatcattcaaattgactatttatccagcactataccactcttctcatttcttcctcacaataatattacaatgtgggcttatccattataacttttattttctttgtcatagatgctgaagttgaaagtagagattttaagtgatatccaaatttttctttcagctacagatgaggcacacattccaacttcaaccctctcttgccatgaacctgtcctattgttgagtgtcaaacatcaccactaagtggatggttatgtagtccattatccaaactgagtcgttttggaaagaaaaagttagacataattaacagtaagcataaactgtatatgtctaagagagatgtggatggatggtcattttacttaaagtggctatagggatgaacatgaaggacaaagtacatttatgggtgtggcataccatgaccatgtgtcaaaggaagtgggaaaaagaaaaaaaaagcaccaagatcatttgattttgttttgttgttttgtttgaaaacaaactcaagaagcaatgagttagaagccgagaagttccagagtcagttatcaagaccatgattttcctgctgctattatccattggcttctctgtgacattgtaggaggaactatggccaatctacaggagttcaacatttaacagtgaatggagtcctcctatgtgagtcctcctatgtgtggagacaccattaagaactaccccaagttctacatctctggatattgcctgaactacagaaaaagggggctgcgcacaccacaatgagtgccctacctgaaactatgctcacagaaacacaaagaagatgggtaagttattcaaattcaaatgttgatttatgactgcaagtcacaattttgaatccctgctgtgtataaccaatctcctgaagaaaacaacaaataactgaaagatactgtggttgggtgccttagcattaaaattctgtttaagtgttgacattgtttatttggattggagtgtctgtccggtcatgtattgtatccatgcattatattcagataaccacaacagctgctaatgcttgattatattctcagggactgcatgcaatgtaacattactggttggttctgccaattttcctcttggtatttataaaggaaaaccaaaactcttggtcagagacaatatgcaaaacagagatgtcaagtactatgtccaaatactgtgaaatataatgagaaataggtaacaaatttatcaatcaactatgtttggatccagggaatctcaagttattcaattcattctctgtaagcctttgtctctctcttcatccagacttttgccttcaaatacaagcatgcgctattttctggaattgatacagcactgttcattttgtgtgtgtgtgtgtgtatgtgtgtgtgtgtgtgtgtgtgtgtgtgtgtgtgtgtgtatgtgagagagagagagagagagagagagagagagagagagagagagagagctcagcagtttttctctggtgttctttaatacatccaccattcactacagtgaagatctctgggttgactgtacactttttaaaatgaattagtagtattctctaatgatgttacacagagaaatgtatggtgtgtgttaccatttcatgttcaactaaatgctaaggtactctgtggctaaaatactctctgtaactgtggcaactacatgtaaataaatgggctctacagttcagcacagacttcttgagctactgaaaatattcttagaccatttaaaaggttaagattgtcagaaagatagttttaaattaattcaataatgaactaatagccatttattgagaagccataatgccttacttaaacactatgctggctactaaacaatggaacgagatactccaagctcacagttttatgcagaaaaaaaaaacagactaatattaaaatgtcacattcatgtttcatgccaaatatcagtcaggattcttagtatttagcaaagtaagtttatttgaagcagaaagagagtttcctaaaaatattaaatggttcacagaacagctgggagggtgaaagccagttttgcaggtcacagtgtctccctgtatctctgagactgatgagtctacagtctgaaaatagtccccttcacttgggtcccctgctcctgggaagtcttagcaatgacacccagtgacttcacactatagactgccggagtatgacagagctacagactgtggatgacagcagcaagctttgcccttgtgtgggccatagagatatataagagaaccactagtatttaagtatacagtaagaggcaagcattgctataggagtagggatgggttcccaatatacaatgaagattccactgttaggacagaagaaaggaaaaaaaacaggtatcaaggacagagaaatgacacggcagctatgagcactggctgttcttcagactcagaggacccaagttcaattcccagtattacaattatgattcagcactatctgtaacttctttttgcaggaatgcaacaccctattctggcctctctggacaccaggagtgcatgtgatacacagatgtagatgcaaataaaacacccacacatggataaaattataacttgtaaaatgattttaaaaataggtaaagactatatggaagaagatataagcaagggcaacatgaaggtcacatttcatatggtaactcaaggcactggagtgtaccaagtagctgagcctcgagagggctgaggcttttatcaatataggaaaagtgatccatggaggtgtgagcaaaagcattcagaggaatgttcagcatagcaacttgtaaaacaccaagaaggaagataaatcacatttccctaaaataacataactcatcttgaatgtttactttaaacatgtctatacattctgttgtatgttggtcagtttgggctacttaaccaatgcactgtgatacaggtaacttaaaacattagttgcatatgtagcagaggatgccctagtcggccatcaatgggagaagaggcccttggtattgcgaagatcatatgccccagtacaggtgaatgccagggccaggaagtgggagtgggtgggttgggaagcagggcatggggagagtataggcttttggatatcatttgaaatgtaaatgaagaaaatgtctatacctctcctgggcatatatccagaagatgttccagccagtaagaaggacacatgctccactatgttcatagcagccttatttataatagccagaagctggaaataacccagatgcccctcaacagaggaatagatacagaaaatgtggtacatttacacaatggagtactactcagctattaaaaagaatgaatttatgaaattcctaggcaaatggattgacctggagggcatcatcctgagtgaggtaacccaatcacaaaagaactctcatgatatgtgctcactgataagtggatattagcccagaaacttagaatatccaagatacaagatacaatttgcaaaacaacatgaaactcaagaagaacaaagaccaaagtgtggacactttgccccttctgagaattgagaacaaaacacccatggaaggagttacagagacaaagtttggagctgagatgaaaggatggaccatctagagactgccatacccggggatttatcccataatcagcctccaaacgctgacaccattgcatacactagcaagattttgctgaaaggaccctgatatagctgtctcttgtgaagctatgccagagcctagcaaacacagaagtggaggctcacagtcagctagtggatgaatcacagggcccccaatggaggagctagagaaagtacccaaggagctaaagggatctgcaaccctataggtggaacaacaatatgaactaaccaatacccctggacctcttgtttctagttgcatatgtatcagaagatggcttagtcagacatcagtggaaagagaagcccattggtcttgcaaactttatctgcctcagtacaggggaacaccagggccaagaagtgggagtcgggggtaggagagtggggtgggggggggaggttgtgcggaacttttgggatagcattgcaaatgtaaatgaagaaaatacctaataataataataataataataaaatttcttaaaaacaaaaacaaaaacagaaagttgcctccggtccgccatctgtaccagggacctgatgctgttccacagctcactgtgtacaggtcccaccaggagagagctgatctctcaggagtgctgacacagtcttatatacccactggagggacaagtcccagtcagagacagcaagaccatctaacagcagagacaacaggatggcaagaaggcaaagacaagaatcttatcaacagaaaccaaggctacttggcataatcaaaactcagttctcccaccacagtaagtcctggatatcccaacacactggaaaagcaagatgtggatttaaattcatatcttgtgaagctcatagaggattttaagaagaacataaatcttacacgcgttcacgaccggccagggaagacgcaacaaaccggaatcttctgcggcaaagctttattgcttacatcttcaggagccagagagcaagagagcaagagctctattgcttacatctttaggagccagagcgcaagagagcaagagtgtaagagagcaaaagcaagagagagaatggcgaaaccccgtcccttttaaggagaattatcctccgcctaggacgtgtcactccctgattggctgcagccaatcggccgagttgtcatcacagggaaggcagagcacatggggtggagaactacccttggcacatgcgcagattatttgtttaccacttagaacacaggatgtcagcgccatcttgtaacggctaatgtgagggcggctccccacagatcccccttttcttttaataagagcaataggccacccatattaatgagagtggagatagaggtcaaatccccagtgtgcaggtaaaggagctgtacacataacctcctctcaggctcatcacccagaggggtcctggtctggtcccgtgtcgttttgcctggggagaaggacacttgaacactcaaccttcttgaaagatgacatgtctccctagaataggctcatatatgccgcagagcccttctactgcagtgcttagccatgcaactctctcgggctgttgaagcacactcactctagcccgtgcaatgagactagcctcgtggggtgcaagagctgaatggccagcgacctattgcttaagcatagatatatcaggggaagcaccatgttctagtactgtaagtgcctgggcaataaccaccttgtctctcctagtttgggccttaagcttacagaccaaccaaagaagcaacactaatccacagcaaagtgtatctccaaataatcccacccatacccattctttaaagaaggaaaatgctgaggagatccaattgggtaatcctttggtcagggacaggtccaagcgcgtggagttgacctgaagtctcaattcccaaagagtctgttcaaattcagccgtccaattctgtaacatatactgagaaagactttttgacaaattagctgccctagtaaatttctcatactgaatggaagtaacggacaatcccggaaacttttgttcacatcccagctgagctatttgccataatacatctagttgttcctggacaagatctatgcattgattaaccagcatgagacctccctgtatcttgacattagctgaggcctgtttatctatgactgtggtcaccgaggctgacaatgtgttaatggtgtcagtcgtctggacctgtccagacagagccaaggctgtctgaatcaaggccaaacccagttccttgttactggggaaaaagcaggggaatacttgagcattatacatcaccggcattgggagtggaaatgtcgacattatcccccaatgctgctctctctttgttattgtcgccctggacatcaccaagacgagggacatcagtattcccttggtcagtctggatttttcgagtgactctttctggtatccaaaatgggttgtcttcattctgtggaaaaacacaaacagctcccctggatcttatcaaaataggatccgggccataccatttattatcaaggacatttttccatttaaccatctcattgggcctatctggctctgaacaatgacgttcagccgcagtatggccatgagcatcaagatttaaaaaattgagtgtaaagagtgccatagacacagacactcttggtactcggggtagagcctcgactccccttttctgttttaatagataggatttgagggtgcgatgcgcacgctcaacaataccctgtccttgagggttgtatggaagtccagtcaggtgggtcacgtccatctgacggcagaactgctggaatttttgagatgtataagctggtccattatcagtcttaaggagtttgggtttcccccaagcactccatgcctcaaggcaatgttgaatcacatgtgaggccttttcacctgttaaaggtgtggcaaacattacaccagagcaggtgtcaatagaaacatgtaaatattgatttctcccaaaggaggaaatatgcgtgacatccatttgtcagacctgtaatggcctgacgccacgagggtttacccctacatgagtagataaaatttgacaacaatctaaaggcattattaagtaatcagaatcattttcagtagaaccaatccctctggcagctcgaggaatactagaggaaggaaaaacagccatgtaggcttgccaaaattattagttgagctattctgtccccttgtgatatagaaaagacaacttgaggacaagaacagagaacctgaagttcccctttataatcctgatctacaactccagggtggacaataagaccttgtaggctgcaagagcctgcctctgtcattctggccacaaaatctgagaaggactcctgaggtccctggacgatctttgttagttgtccagtggcttcacctgctcgggagagtgccttccaggccctaatagccttttcatctgattcagaactactaagaactggctccttgagctcatctagtgatgagtataggctgcttctcctagagacctccgctaattgatctttttgcttttcttttttcttttccttccttctaatctctccccaggtattcttacctgacctaaacttttcctcgggttcaagacccgtggaaaggcctgtatacttattttgtgtaccatatttcctctttgctcctactctctctccccgctttacttctgatagattgccctgaatttcatccagaattttcagccctgccttaactgcttgataacatgtgaaaaggaacaaaaaggctcctaacactagaaaaagttcaaggccaaacataccttgtaaagctatttcccactttacttctgatagactgtcttgaatttcgttagaaagttcaaggccagacgtaccttgtaaagctatttcccactttacttctgataggctgtcttgaatttcgttagaaagttcaaggccagacttaccttgtaaagctatacttacgggtaccctgttccccagctgaagagttctgaattcacgcagttgaatccttctcaacagtctgttttacgggaacacttcattaccaccgttccccagctgaggagttctgaatccaggccgaatccttctcaacagtctgttttacgggaacacttcattaccatgacctgcagttctggttccggaatgagggatcttccttgcgccggtgatggtaactgtcccgggttttctcgtcccgggtcttctcgtcccgggtctcagcaccaactcttacacacgttctcgcgaccggccaggaagaacgcagcaaaccagaatcttctgcggcaaagctttattgcttacatcttcaggagccagagagcaagagagcaagagctctattgcttacatctttaggagccagagcgcaagagagcaagagtgtaagagtgtaaaagcaagagagagaatggcgaaaccccgtcccttttaaggagaattatcctccgcctaggacgtgtcactccctgattggctgcagcccatcggccgagttgtcatcacggggaaggcagagcacatggggtggagaactacccttggcacatgcgcagattatttgtttaccacttagaacacaggatgtcagcgccatcttgtaacggctaatgtgagggcggctccccacacataaagaaatacaggaaaacacaggcaaacagctagaagcacttaaagaggaaacacaaaaatcccccaaagaattaaggggaaatacaaacaaacaggtgaagtaattgaacaaagccatccaagatctaaaaatggaaatagaaacaataaagaaatcaaaaagggagacagctctggagatagaaaacctaggaaagagatcgggagtcatagatgcaagcatcaccaacagaatacaagagatagaagaatcacagttgcagaagataccatagaaaacattgacacaacagtcaaagaaaatgcaaaatgcaaatagatcctaccccaaacttccaggaaatccagtacacaatgagaagaccaaacctaaggttaatatttatggaagagagcaaagattcccaacttaaagggccagtaaatatcttcgacaaaattatagaagaaaacttccctaacctaaagagattcccatgaacatacaagaagcctacagaacaccaaatatattggaccagaaaagaaattcctcccatcacataataatcaaaacaccaaatacataaacaaagaaagaatattaaaagcagtaggggaaaattttcaagtaacacataaagtctgacctattagaattataccagctttcccgccagagactatgaaagccagaagatcctaggcagatgtcatacagaccttaagagaacacaaatgctggcccaggcttctatactcagtaaaactctcagttagcatagctggggaaacaaagatattccatgacaaaaacaaatttacacagtatctctccacaaatctagcccttcaaaataaaatagatggaaaactccaacacaaggagagaaactacaccctagggaaaaaaaaacaagaaaataatcttgttttactcagcaattaaaaagaatgaatttatgaaattcttaggcaaatggatgtatctggagggcatcatcctgagtgaggtaacccaatcacaaaagaacatacaagatataaactcactgataagcagatattagcccagaaacttagaatatccaagatataatttgcaaaacacgtgaaactcaagaagaaggaagaccaaattgtggatacttggttccttcttagaatggggaacaaaatacccatggaaggaattacagagacaaagttcagagctcacacagaagaaaggaccatccagagactgccccaccatggggatccatcccatatactaccaccaaacccagacactattgcatatggcagaaagattttgctgacaggaccctgacatagctctctcttgtgaggctatgccagtgcctgaaaatacaaaagtggatgctcacagtcatctattggatggaacacagggcccctaatgaaggagctagagaaagtaccaaaggatctaaaggggtctgtaaccctataggaggagcaatagtatgaactaaccagtaccccccaaatctgtgtctctagttgcatatgtagcagagaatagcttagtaggccatcaatggaaggagaggcccttggtcttgcaaagatcatatgccccagtacagggaaatgccagggccaggaagcgggagtgggtgggttggggaacagggccaggggagggtatagggagctttggggatagcatttgaaatgtaaatgaagaaaatatttaataaaaaaatgtatgtcaaaaaaaaaaaaaaagaaaagcctaaaagaagatagctgcaagaagagaatcccaactctaacaacaaaaatgacaggaagcagcagtcactttaacgtaatagctctttaacgtcagtggactcaattccccaataaaaagacatagactaacagaatggatatgtaaacatgactcagcattttgctgcatacaggaagccaacttcagtgacaaagacagacactacctcagagtaaaaatgtggaaaaaattctgcaggcaaatggccccaagaaataagctagagtagccattctaatatcaaataaaattgactttcaacctaaagttatcaaaaaagataaggaaggacaattcatactggtcaaaggaaaaatctaccaataactctcaattctgaacatctatgctactagtgcaaaggcacccacattcataaaagaaactttactatagctcaaagcacatgttgtacctctcacaataatagtgtgagacttcagcattgtactctcagcaatggacagatcatggaaacagaaactaaacagagacacagtgaaactaacagaatttatgaaccaaatggttttaaccgatatctatagaatatttcatcctaaagcaaaagaatataccttcttctcaacagctcatgctaccttatccaaaattgaccataaaatttataatgaaacaggtctcaacagattcaagaagattgaaataatcccatgcatcctatcaggtcatcacagactaagactggtcatcaacaacaacataaacaatagaaagaccacatacatgtggaagctgaacaacactctactcaatgataacttggtaaaggaagaaataaagagactttttagagtttaatgaaaatgaagccacaacatacccaaatttatgagacacaatgaaagcagtgctaagaggaaaactcatagctctgagtgcctctcaaaagaagctagagcaagtatacagtagcagcttgacagcatatctgagagctctagaacaaaaagaagcaaatatacccaagaggagttgaaggcagaaaataatcaaactgagggctgaagtcaaccaagtagaaacaaaaagaactatacaaagaatcaaacaaaccaggagctggttccttgagaaaaacaagatagataaacccttagtcagactaaccagagggcacaaagacattatccaaatttacaaaatcagaaaatgaaagggagacataagaacagaaaccagaaatggaggaaatcc

SEQ ID NO: 1157 - DNA, 3123 bp, Mus musculus
tctctctctctctctctctctctctctctctctctctctctctcagaatgatggctctgggtagagctttcgctatagttttctgcttaattcaagctgtttctggagaaagtggaaatgcccaggatggagacctagaagatgcagacgcggacgatcactccttctggtgccacagccagttggaagtggatggaagtcaacatttattgacttgtgcttttaatgactcagacatcaacacagctaatctggaatttcaaatatgtggggctcttttacgagtgaaatgcctaactcttaacaagctgcaagatatatattttataaagacatcagaattcttactgattggtagcagcaatatatgtgtgaagcttggacaaaagaatttaacttgcaaaaatatggctataaacacaatagttaaagccgaggctccctctgacctgaaagtcgtttatcgcaaagaagcaaatgattttttggtgacatttaatgcacctcacttgaaaaagaaatatttaaaaaaagtaaagcatgatgtggcctaccgcccagcaaggggtgaaagcaactggacgcatgtatctttattccacacaagaacaacaatcccacagagaaaactacgaccaaaagcaatgtatgaaatcaaagtccgatccattccccataacgattacttcaaaggcttctggagcgagtggagtccaagttctaccttcgaaactccagaacccaagaatcaaggaggatgggatcctgtcttgccaagtgtcaccattctgagtttgttctctgtgtttttgttggtcatcttagcccatgtgctatggaaaaaaaggattaaacctgtcgtatggcctagtctccccgatcataagaaaactctggaacaactatgtaagaagccaaaaacgagtctgaatgtgagtttcaatcccgaaagtttcctggactgccagattcatgaggtgaaaggcgttgaagccagggacgaggtggaaagttttctgcccaatgatcttcctgcacagccagaggagttggagacacagggacacagagccgctgtacacagtgcaaaccgctcgcctgagacttcagtcagcccaccagaaacagttagaagagagtcacccttaagatgcctggctagaaatctgagtacctgcaatgcccctccactcctttcctctaggtcccctgactacagagatggtgacagaaataggcctcctgtgtatcaagacttgctgccaaactctggaaacacaaatgtccctgtccctgtccctcaaccattgcctttccagtcgggaatcctgataccagtttctcagagacagcccatctccacttcctcagtactgaatcaagaagaagcgtatgtcaccatgtctagtttttaccaaaacaaatgaattataagaaaacccttccatcgacaaccaaatgatcactgagatggaaagtctggaatgcttgctctcccccgtagctcacagaagagaaagtcaacgtgaccttgctacacatcttcagcattctaagaaatcattttgctcttctagctcagaagcatttgcacaaagcaggaagaatctgttttccctgttgttggattagtcataagagtccatatgacccaattaaaattgcaaaactcagttaagtgaagaaagaaagatagacaaaagaagatagaaggatgtggtgaatgcaggaagaagaaaatgaaagatgtgagtggtgggtctatcattcaaattgactatttatccagcactataccactcttctcatttcttcctcacaataatattacaatgtgggcttatccattataacttttattttctttgtcatagatgctgaagttgaaagtagagattttaagtgatatccaaatttttctttcagctacagatgaggcacacattccaacttcaaccctctcttgccatgaacctgtcctattgttgagtgtcaaacatcaccactaagtggatggttatgtagtccattatccaaactgagtcgttttggaaagaaaaagttagacataattaacagtaagcataaactgtatatgtctaagagagatgtggatggatggtcattttacttaaagtggctatagggatgaacatgaaggacaaagtacatttatgggtgtggcataccatgaccatgtgtcaaaggaagtgggaaaaagaaaaaaaaagcaccaagatcatttgattttgttttgttgttttgtttgaaaacaaactcaagaagcaatgagttagaagccgagaagttccagagtcagttatcaagaccatgattttcctgctgctattatccattggcttctctgtgacattgtaggaggaactatggccaatctacaggagttcaacatttaacagtgaatggagtcctcctatgtgagtcctcctatgtgtggagacaccattaagaactaccccaagttctacatctctggatattgcctgaactacagaaaaagggggctgcgcacaccacaatgagtgccctacctgaaactatgctcacagaaacacaaagaagatgggtaagttattcaaattcaaatgttgatttatgactgcaagtcacaattttgaatccctgctgtgtataaccaatctcctgaagaaaacaacaaataactgaaagatactgtggttgggtgccttagcattaaaattctgtttaagtgttgacattgtttatttggattggagtgtctgtccggtcatgtattgtatccatgcattatattcagataaccacaacagctgctaatgcttgattatattctcagggactgcatgcaatgtaacattactggttggttctgccaattttcctcttggtatttataaaggaaaaccaaaactcttggtcagagacaatatgcaaaacagagatgtcaagtactatgtccaaatactgtgaaatataatgagaaataggtaacaaatttatcaatcaactatgtttggatccagggaatctcaagttattcaattcattctctgtaagcctttgtctctctcttcatccagacttttgccttcaaatacaagcatgcgctattttctggaa

SEQ ID NO: 1158 - protein, 474 aa, Mus musculus
SLSLSLSLSLSLSLRMMALGRAFAIVFCLIQAVSGESGNAQDGDLEDADADDHSFWCHSQLEVDGSQHLLTCAFNDSDINTANLEFQICGALLRVKCLTLNKLQDIYFIKTSEFLLIGSSNICVKLGQKNLTCKNMAINTIVKAEAPSDLKVVYRKEANDFLVTFNAPHLKKKYLKKVKHDVAYRPARGESNWTHVSLFHTRTTIPQRKLRPKAMYEIKVRSIPHNDYFKGFWSEWSPSSTFETPEPKNQGGWDPVLPSVTILSLFSVFLLVILAHVLWKKRIKPVVWPSLPDHKKTLEQLCKKPKTSLNVSFNPESFLDCQIHEVKGVEARDEVESFLPNDLPAQPEELETQGHRAAVHSANRSPETSVSPPETVRRESPLRCLARNLSTCNAPPLLSSRSPDYRDGDRNRPPVYQDLLPNSGNTNVPVPVPQPLPFQSGILIPVSQRQPISTSSVLNQEEAYVTMSSFYQNK

SEQ ID NO: 1159 - DNA, 39797 bp, Homo sapiens
gaaaataggtttaatagactcacagttcagcatggctaggatgcctcaggaaacttacagtcatggtggaatgggaagcaaacatgtcctttttctatggcagcagcaaggagaattgctgagcaaaagggggaaagtcccttataaaaccatcagatctcgttagaactcattatcaagagaacagcatggaggtcagcatccctgtgattaaatatcctcccactgggtccctcccatgacatttggggattatgggaactaccattcaagatgagatttgggtggggacacagccaaagcatgtaagtgtccaaactgagacagttgaggtgcttcctttatccctcagttgggcttgatcaacctgcaaaaaaaattccttaggaatttcccaaattgaaaggagccaatcccactgtctgctacccacaaaagacactcacttgcctggacacacatacaacatacagttacaaacaagtccccaagagttttcatactgaaacagtcagtgtgcgtccctctcttagtcagttgggtttgttcaacctataaatggaaatgcctttaaaaatgtccctgagtgaatggagcagatcctgctgtctggatccacaaaggacattcatctatccagatgcagatgtcatatttcaagggctgtatttcctaggcaatcaggaacatggttggggccagcaacagcaaagcctgagaaaaatgagaagttatcaccagccaaaattgagcagacagctgcttaggaaggcttctgagactgctgacacacagcagcccagccatgagcaacatggtcatggtcagggaactaaaatctgttaccaaaacaccaggggttcagttgaggtcctgctgctcatcacacagaaagccaattactgagacaatttttgccaaggaagaaggctttaattgggtgctgcaactgaggagatgggagataagtctcaagtccatctccctgactgactaaaattagagggctatgcagcagggaagaaatgtaactatgtatgggaaaacaggagctcaggagggctaaggaagcaatcataatgaatgaggggccattatctcctgagtttcacgtctttgatgccttttgagaggactaaactcattgtctggctctgcttcagaagaaaagtatcaatttctatgtttataaaaagaaataataactgattatggcagatgtcccagactttttggcaccagggactagtttcgtggaagacaatttttccacaaagtgggagcaggggatgaaattgggttgaaactgttccacttcagatcatcaggcattagttagattctcataggaagcacgcaacctagatcccttgcatgtgcagttcacaatagggttcacactcctataagaatctaatgctgccaccgatctgacaggggtcagggctcaggcagtaatgctcactcgcctgctactcacctcctgctgtgtgtcctggctcctaacaggccacagagcagtaccagtctgtggcccagggactggggacccctggtctatgggactattggatctgtttcaatcaaagcacacaacaaagggataggaaggaaattccttaacctgataaaggacatctaagaaaaccccgtagctaagggcatgtttaatggcaaaaaaaacctgaatactttgtccgtgaaatcaggaaaaagactgacaaattctattctacattgtcctggagagtctaaccaggacaattagccaagtgaaagaagtaaaaagcctccagactggaagaaagaagtaaaactatcaccatatgcataaacatgattctagatatagaaaattgtctacattcacaagaatccacaaggaaaaaagaaacccacaagaaaaaatctattagaacaaataaattagttcagaaaaattgtaggatataagataaatatactaaaagcaattgtatttttatagcaagcaactgacagtatgaaaaggaattaagaagacaaatccatttgtaataacattcaaaagaaaaataaatacttaggattacatttaacaaaagaagtgagaactatgaaacactattgaaaacaatgttttaaaactttaagaatggaaaaatattctgtgctaatgaattaggaggtttgatattataaacggcaatgctctcaaaattgaccttcagatttaatggagttctgtcaaattccagcagcctttttttataaattagtaaattaatcctaaaatttatatgaaaatgcaagagacctaaaatatgtaaaacaatcttgaaaaaaaaggaaaaataaaattggagatcttaatttcccaatttcaaaactaaccataaagttatagtaataaggacagtgtagtgccgcaagaagagtagatatatagatgaatggaatagaattacgaatctaaaaaaaataaccgtgtataatgtggttaattgatttcaggcaagagtggcaagacagctgaaaggagaaagagcagtcttttcaacaagtagcttttccatcaactggatatacacatccaaaagaattaagttcctatataattttttttttgagatggagtatcactccgtagcccatgctggagtgcagtggtatgatctcctctcactgctacctccacctcctgagttgaagcaattctcctgtctcagcctcatgagtagctaggactacaggcacccaccagtacgcctggctaatttttgtatttttagtagagacagggtttcaccatgttggccaggctggtcttgaactcctgacctcaagtgatctgcctgccttggcctcccaaactgctgggattacaggcgtgagccactgcacccaacccagttctatataatttgtacatgatgatattctttctagagaagtcgtgaggagaaccttgggactgctggtgtgcttcgggtctccagcaataagatttttcagtaggaaagccaaaggctgccaccttccaggcctcgaacgagggtacagctggtgagaaggtgatggaaggggatggagcagctgcacagccaggcagttgttcttaacatctttgaggtcacagacacacgataacaaggaaaagctacaaatatctctagaaaaatggagagcaagttttgcacactatcgtgaggggtttcctgcccctcccaccccaatctatgtttgagacccaagttagagcacagatggatgtgccagtaagaacaatgctctgatctggtctggcttctccagcaacagagcttcaggtaattgctaagtcctgaagaagaaatatacacctttggccattcatatggggctggaaatttaaaaaaagaaaatctcttctcttattctcaccacaaatttgtacctgaggggctgaaggaaccaacatgagagtgctgagtgaggagaatggcaacctccctctgcttaaatctgttttgtgttgtggttctctgcatggaattttgtttggaaagtaaatgaattctactgcttaaaaagctctgaattccaatgaatagggcacgcatttagaatcgcacttgggtcccaattctattcctgcaagtgcctctcacctacactatcctaacctgcaaaatgggagaatgacattactttagagagttactctgtgacggaagaacatggttcagtgcctgtcacacagatatttggtgcatgtgagttttcttcactatctgctttaatcaagaagatagcaaatatggcaagtgatatcagaaaatatttaaccatgtttctccttcccccattaaattcaccctttgtccctctcccaccagttacccattgctccaagcaaaaattgtcgtcctagaatacagactttaaattcctgcccttggtctttgagatgcatgcgtttgcatgaccactaaatatacaactcttgcagaagctgctgcttctcttaacatccattctctccttctttctttaactaatagtacctccaattttagttgggcatatagcaaacctctcttcagactgtattacccttcatctcttgcagctaaagtgcccacagtgactactttctggccacaatgttatgagcagaagtaactttcagatcatgtccttaaaagggaaccccgtcactttctcctttttgtctactctcccagagaggaaatgggatcatggtgctggtaagctaacctcaaatcaatacgtagacaagagcagccacctaggaaatgaaatatagaccgggttcctaattgtgtgagctcacggagctgcctgcctgctgtggataatccactaattgagagagcaataaatttgcatccttgctagagccgctatgtttgtgggtctccctgttttggcagcatagctcaactaacacatataacaaaaaaaaaatcctttattaaattccaaagtttcctaagaccgatgataaagtgaaagcaaaagttggcagtacattaccattttcttggaaagcctctggaaagaatgattgtatcttaatcacttagcccaggggtatgcagtgtgaccaaagacagagcccttgttcctgcttttttaggaacacctgctgattctctgtgacaattccatgagcagtataactgagggtcgcttttaaggttgactttacttttttttttcttgagacagggtctcactccgtcacccaggctggagtgcagtggtgccatctctgctcactgcagcctcaaccttccaggctcaggtgatcctcccacctcagcctcctgagtagcttacaggtgcacaccatcacacctgattaattttttgtatttttggtagagacagggtttcaccatattgcccaggctgggactttgcatattaagcttgggaaattttaggctagcagagttgttcttggggactccatttgcacagaggactgggttctaagagagcagaggaagcttcagagtagaattgaggactcttgccagttctcccagtggtccagatttggaaacgacctgcagggtgtggccaccaactgtggtccctcaggaaccactctgcaggaatggagcttaccctgaggcaagtactgtgtgcaggggcacgggccagaacccagaatggggttgcttgatccagacttttctcagaaacacactggggcactgtgtccgacagtggagtgggcagccggagctgctgtgaactgtttgtccactgggaaggccagagagggagacactgagctgcagggacaccacactggctcccgctgcccaaaggggcactgtgactcagcctttgccagaaggcataccactctcaccactcttcccagggtcagccctcttgttcactgttttatcaaaatgtgggcatgtactgaaattgaaataccactcactttctggcagaaatgtcgtcagcaaagagtgaaatgttggtactcaaagtttccatttttattgcatccagagacagaggctaaaatctcataaaggtgaaaatagtatgacatttcaaactctgcccagaaagaagacaaatggcagcaagacatgaggctgaagacgtgggggaaggaggaaagggaaatgaaagaagagccacaacaaggaaaatgtcatgctcctggaaatgaaacttcaagatgctgggactccccctcagaatcgtagggactgactcagcacatgtttatcaaatgctagagactattcatttaggaccagagtggcattagctttcctacagccatcctcacctgcttgacacccttggatgttgggtttttttgtttgtttgtttgtttgtttgttgttttttttttccacagctcttgtggtccccagcctctctcttgagcagggctggctttttttttttaataagatagctggtgcccaagattgttttccaccttaaggataaaacctgttaagaaaggtaagttgacagtaggtgggggcaggtcatacagattttatgacacatagaatgtgttttcagtatttttcaaacatcagattttacccaggatattactgttgcaacatttactgcctgttattattgctgtttcacttattgtccttcaatatatagtcccaaggtgagtgacttttaaatcatcctcatttaggacaaattgctaaaggcttaaggactattttataagcttcatctaaaaactgagtcagaggaatgcttttgtccttgaaacattttgtttcccagggttctcatgatacactggtatctgtccaactaaattcataatttctgtagagaatagagtcaaaatttctgttcctaatagatggatccagatagtaaacactagtaataagacaagatgctcagcctgaattttcccaggaaaacctttgtctttactaatcagaaaaaaaaaaaaaaaggaagatctgggctagatttttatccagttaacaaacaacaaacaaccaaataatggatacacccctctaacattttaggatctcaatctcgttaaaagataagttctcttaacttgctaggactctaccggttatataggaacaccacagaacttattgcaatctgaagataaaagaaagtcttttttgtgttttgcctgttgggcaaatagcctgaacaattacaaaaaaggaagaaaaggagacttggccaactggtgtcaggagtcttaacaaggtcagtgtgttctgcttgtgtatgagaaagaatcaaatggctttttttttttttttttttttgaggcagactgtcactctgtcacccaggctacagtggagtggtgcaatctcagttcactgcgcaatctcggttcactgcagccctgagtagccaagactacaggcgggccccaccacacctgactaagttttctattttctgcagagacagagtctcactatgtttactagggctggtcttgaactcctgagctcaagtgatctgcccacctcagcttcccaaggtgttgggattacaggcatgagccactgcacccagctggctttcctttttaatgattcactacatcatacaaactcatcaaactgaaggaagacaaagtacaaaagagagacgagaaaatgtagccatgaaaggaagtgatgggtgaagaggaggagaagaaatatggccaagtcagttgccatgccaaactgcttgcttctaccacagtccaatgcttccctcctgatttcacatttggagacttgagtgtccccaaatagtgttcctcatcctcttttcttctttctgtgcttgtctcacaaaagtaatgacaaagtaatatagtaaatgtttgttacctgggggatagggtgaactaggtggttcttcctcagcttttctaagtctccaaaggactaacaagacctgagtgaggaaagagagaaggcactgttgttcccccacaatctctagaaggactggtgacgcatgtcatttttctttgagctccccacactttaggcttctctctgaggtcttttcagcatctcctgccccacccaagagtaagcacccctgtggaaatccccagaacaaaccagcacatgctgtaccaaaatattgtgtcttggctttgttcttttacatcttcacaactaaaggaaagagatacaatcaaaatgatagtccacttaaatgataaacaagagaatttaaagagacataacccagttactcacccatgaagtgacaatctgttagcagtttaggagatttgcattggtagatagatataatttgggatttctccttgaacattagcttaattcatgggaatctgtaattatagctttcttgaaagggtatttagctcagtgtacaaaacataccaatttttgtgaatcaggcttacaattttctaaccaagctttcaaaacaagattagaaatgagggcataaattattatcgatgcacaaaattgtcactctttatttggcttggaagggttttgaaatgcccagagaaggccctgacaaatggagaagatggaatatgtccccttcagttggattcttgctccgaagtattccttgagcctatactccaaagtgtggcattataactggtgcagacggagtctgtcttaaaactgaaaaggaggatccagagactggtacaaatgtcccacctcctttttttcttacttcgttattgtcaaataattgtaatgatgggacaagctaaatcatgagtcttttaaagtctcttcgatttgctttacacctggggggttgttgcttgtctctgctaattttagccatttcacaggcccatgggagcaattctacctaatgacagtgaatccaacagaagttcataactcactgatcacttagtttctctgcactcctcaccttataactgcagtcttgtggcatttttccaaaagagagccactgtgaatcaagcatagagttttatggcctgaatccaggttagattatttttttcaagaaaaagaaaaaaaaatctaacagttaccaagaagcagtcaggctttacaaatatcaccactttaaccatgaggccatattaggaaggcttttgactggcattcaggtttgggggagtctgaattttctatgccatggtctcagatttctgccccatatacctaggcactaatttagttcatatgtactatgtgtacctgaaaagttgtgtggcaatcaaattttcacaaatagaatcctgttttaaatacactaagaaagtacctactttatcctttaaacaagaggtcagcagactttttctacaaagggtcagatagtaaagattttacaccttttgtacaatacaatctctatctcatctacttagctctgccattgttgcataaaagcagctgtagatgatacacaaatgggtgaggctgtattccaatgaaacgttatttgcaaaaacaggtggtagattaaatttggtcccaaggcttacttgggaaaaaaaaagatcttttgaaaaagaaaaaataaatgaataattttttaaaaaattgttccctaggtcatagtttgccagcccctgccctaaacaaataattcttgaatgcctactgtggtgtgtaagatatgagtaaataccagggatacacagagaacaaaagagaaaaactgctattcttgtgaaacttggaagttggaggtaagctatttaaaataaacccacaataaagtacttcacatagtgcagactgtttctttaaatcaaaactcactccaaacaaccaattgattcactttgtaagtttgaatttttgtcttcagattcttttaaagtgggcccttagtcaggagcggtggctcatgcctgtagtcctagcactttgggaggctgaggcaggcagatcacttgaggtcaggagttcgagacaagcctggccaacatggcgaaaccccgtctccactgaaaacacaaaaattaggctggcatagtggcatttgcctgtagtcctagctactcaggaggctgaggcaggagaattgcttgaacctgggaggtggaaattgcagtgagccgagatcatgctattgtactccagcctgggcaacaaagcaagactctgtctcaaaaaaataaaaattaaaaaaataaagtagcctctagcctaagatagcttgagcctaggtgtgaatctactgccttactctgatgtaagcacagtaagtgtgggggctgcagggaatatccaggaggaacaataatttcagaggctctgtctcttcatgtccttgacctctgcttacagcagcaatacttttactcagacttcctgtttctggaacttgccttcttttttgctgtgtttatacttcccttgtctgtggttagataagtataaagccctagatctaagcttctctgtcttcctccctccctcccttcctcttactctcattcatttcatacacactggctcacacatctactctctctctctatctctctcagaatgacaattctaggtacaacttttggcatggttttttctttacttcaagtcgtttctggagaaagtggctatgctcaaaatggtgagtcatttctaagttttcttatggattttggattatctgtagcatggtttcaggttattcagttccctaacagacctgagtcaggcactgggtttgaatgcagtttgagaatttcccacatattcagtcattttttttaatgttctaaccaccatgacagggggcaggggatcaatactatgggtggtttataagacctcagtattctcaagaaggaatgcatttcactcccaagtgtagatcttaaatgttgaatgattactctgctcttacaaaaagaatgctcatgtagatgctatgactgtacttgtaggaaaatgtccaaagtaattttaccttgtcaggagatcaaactggattcattttgtttgactttttaagaaatcctgaaagcataactttcaggataaggtaatgtacagaagagaagcaatagctttgtcttcagtgaccagtgctatatcctcagcacctaaatcagtggctagaatatagtagacatccaataacttttgaaagtgttttcaaaatactttagttttgagagatttatgtgagattttaagtaaataactgactagagaaagatctaaatgagtttactcattgaaatacactgaattgcctccacaccaacaaattggccatatgtaataattctttttgggatctaaaaaacttagtaccgagaagccaaccctgcccatacataaacacattgtaattataacaaaactaggcagaagcttctaacagcagcaggaggcatgtgggaatttagaccatcaacttgctcctgcaaattaagccctttctctttaagagttaaaaactatttggctatagacaatatcaaacacatcagcctaatgactcagcttatgcattttgagtcatgtaattacgaaggatggaaatccctagaattttctcattaagggaattgtcagagagtttgacattttttacagtatatgactcactttatgggggatgattattattctatgctaaactttgccttggatttccacaaagactgatgggaggcaggaaacataaatcttactctctttcatgtcatctatactcactagttcaccctggtgatcatactatttttaaaatatataagaatgctagttgaaagctgggttttcactccaactttttaagtttcagattttttagaagatgtataattaccctattcacatgattacgtcaaaatacttcccagtttggggtataggaattcacattcagttgctgcttgttgaaagttgtcaattttctgatcatcacaaggatgatcaagagaagaaagggatactttttaaaaatccaaatcatttacactattaatcaactaactccattcagtaggaagaagacttctagatgacactggcttgcctatgatacatattccacacaatttaaatttttatggataaatatgtctagatacctatttaaatatgaataatattaattattgagcatttaaagaataatagattaactcattattcaaaagctctatgtaatttcaaaaccatagtaattataacaccgtcaattgacataaactttttaaagagaagctcaaatgtttcatgtatattttcagaattagaattcttattttaccttttcattacttatttctcagaaaatattatactcatagctaatccctattaaatccttactgtgttctaagctacctctttgtaaatatccattcagtgattgctcatagcacgagtttacatattagaacacatgtcttagagaagttgcctacctgacagaggaccacaggtagagtatccagaatttaaacgcacatctgtccagctctaacaccacaggtcttaaccactgtgtacattaactactcttagccaagaatttttcagctcacgtcatgtagaatattctttttgtaaaatgccatcacattttataagtcattgaagggaatttttcttggttacaaagcaactctgccccataatatctactgaaaagccagtgagctgcttcctaaaacacagccattttaggtgcaggaaacagtgtataaatggctcattgtatattgtatgctttgccagactgagtggcagtgggagtcctttgttatgtgggtgctgacatctgctagagtgtgctgtctctattgaagaatcgtgaagacaaagccgacccacaggatgtctgaatccaaataataatacatgttctgtgtatagaattggtggaagagaaaatgtcaggacagtgtgaggactgccatgtaaggtcagaaccactgcatttagaaagctaccactgcacagggaagaaatctaagtctacaaaattagtgggctgtctctcattatttcgtgctgtcatcagaaggagggccataccctgctgaaactacataaagagcttttgctggtggcagaactgtgaactggatggattctgggaatggccagaaaaacaaatgcctgtggttgtgagcagtgcccacacccatggtctagctagggctgtttgagatttgttgctttgactgaaccaacctgtcattcaactggttggtccattcacagtcagctttattaactttcccattttccctactgagttatttaagtaaagaaagtgctattcggacagcccttggtctctgggacaatcaactgggatttgattttagtatattctgtctccagtgtaaagccttggaagcatctaatttctagtactgatgaaccaaaaatacatggaagcagtcctaggctcacacttgagcactctgagaatggctttgcttactccagattttctcaggtcccagtgggtgtatattttctgacatatttattccagcctcactttcctatcatgtaaaacatacatacaaaatgtagatttcattatagggtctacaaaacagcttaagaaaccaaatactatgtgtgacagatcacactttccaaaagtaatagcaaaaaaaaaaaaaaatctggttccccactttcttccagcatcctgctagaatctatcagatactgcgtctatagaagaatctataagaacagaagcagtatgtacaacattcacaggaagtttcaccaaatcggagtcctgccagatctaattttttttccctaatcacgtttgtctcagtcagtagcttaagacaatggaaataatcagtgccacttttaattgggatgcctttttaggcaagggaaagtgacctcttaaaaaagcaaaattctgactgcaagatagctatcattgtccttcatttaagacaaaaaaaatactagggagggaataaattatgatttgtaataaagtgaaaagtgagattaggtagcatggggataatggaaataaagtgtctcttctttgaaataatatgaacaatcaatgtaacaaatgtagcagaaaaaactccagtttaaatacagaaaagaatgtgttcaatgcctctggttctttaactcagaaatatttggaggttacttactcattatgatggattttttttttctattggaaaactctgttagcattgagcgtttttgttttttgttttttgttggttggttggttttgaagcatttttcttgtctttgcccttgggcttttcttccttgaatactacataatccattactatttcatgtctgccacagagtctgctattttattaaggtcatgccatatttcaaaaggatgcatttatttgtttcattaacagctgcatgtttgttcctccccaggagacttggaagatgcagaactggatgactactcattctcatgctatagccagttggaagtgaatggatcgcagcactcactgacctgtgcttttgaggacccagatgtcaacatcaccaatctggaatttgaaatatggtgagggatggtggttttaatggttgcttagacatcctctgtctctcttttcatatgctctttttagtagccacaaaagaaagaatatgtggcctaattaacaaatgttaacatctaaggaattcccaaaggcctcctgaaactccttgtccttcaccaaaaacactcatacaaagctcctctcacggttcagctttcagaccctgagactcagtcaaatgatgctctggatcttggggatcccacatccctcccaacttcatatcagaatttaaatcctgcgtctcctacaacacttctcaccaaaaatctgtttgcccaacacgagacaatccagtgtcttcaagttgcatctgagagttaaactgccttgtttccaatcccaataccagtgcttactagttttttgacctagagaaagttatgtaatgtatctatgcctcagtttcctcacctgtaaaatgagataacctgcctcacaggaaggctgtgatggttaaataatttcatcatataaatcattccaaatagtcggccagtgaataacgagtaatggggaagcaacattaaattataattctgtgaatattgacctaacttctaccatcttgacacaatttgacttcagatgatcctctcaatgtaaattttccaaaaatccacaggaataagttggcattttgtttcacaaggtctcacagaaaagacaaaggaaaagagtcttggtttgaaagtttactaaaggtctcagggaactttatcttctccttctccttcatccataagtcatctcttgttgccaagggttactatctctggtgatttgagaaactactctagcttgaaattctgacctgaggctatctccaaattcatatccgaatgacctactttttagttagtgtcctagtgagcaaagtaaatcaagatccaccagtagtaatagaaggcttcctacattccatagacactgagacaattctccacagtctatagtccaaacaagccctgaattccagtttttgtcaatttatgggagcttcctgcatctatttatggagtgctttctgctgcagtccttagataaacatgctgttggacttgagtagtgtactgtgttctctgtctgcctctgttcacttccctaacacattttccaggaataaaatatgtcaaaagaacctgaaccagttcgatgtccacaatctaggctggaaatggattgcactaaaacagccataacaactcattcaaacaaggcactcattttcatgggcaaatcactctcccacacggaggtttgactttggcttctttaaccagctggctggtgggctgagtgttcatcctggtttctcttggccaagctgaggttgacctttctgttcactttcattcacaccatatttgaccacttccttgcccactcaaacatacttaccctttaacatatctcttgacttttcctgtcatattgtaatctgtccagagcctcctctatttgggttttccaattggattcagatatttcagttggaaagggactgccttaagaaagaaacgttttcagtggaaaatatatgtatgagctctttaatagatgaactcctggagttcagagcccttaaaaggatgcccagtttcacaagacagccatacggtcatccttgattgtccattgctcattaatttcattctcaaaatcatgggaatgagctgagaataccattttagatcctccttaaattcccaacagtaccagaaacttgctacaggttggggcctgtaattggatatttcacacatactttccttacaaatatattctatactcaagaattgaactaaaagttattgtcctagtttctccacatcccatgtttacctaaaattcagaaatgggaccccgctcccagtctccccttctatatttatttatcaaatcgtgacaacattaccatcttcagatctttccacctgatgtttgtcctaagcttattccctggtatctgtctagcttacccaaaaattcggtttttatttttatcctgttccaagttgggaaagcctatctaccccaacaaggaacacaactccctagtaactttgagacacacacacacatacacacctactctttaaagcctaaacagtcgcacactctaaaagatagcagttaacaaaagtaacgatttgggagaacagttttaaggaatgtccccaaaataatcaatacatttagccagttaattaacttaacatttcttcaccaatctctagttttcatgactgtaggagcttaaccagtcactctcagaccacaataaaccaaaggtgaaagattctgtaacgaaagctagggcactctcccctgcatttaacctcctggccagctcactcgaagccagacaaacaggttcctctttttgtgcagagtccaggaaccattctcgaaaggactcatttgagcacatgcagagaagagtgtacacacatccagttcaccaagggaagccaacacacattgtgggttgtaggtagtaaaaggccttcctagaacacactccttaggatttaaacaaaattacatcggttaatggaaagaattctttcatatacgcaaacttacccagaggaacttttcttctgcccagatcttcacttccaatttgacccagttatacctctttagagctatttggctgagcttaaacagcacataggaaaaacaaattggtaactgtgtttatcacagaagaggaaaattaaatttagggttgggaaaggaaaataaccctatgatattacttttattctacctttacaatgagaatatatacctttgttacttctttaatttttacattatttacttatttttctttgctttcttgtttgattacaatgcattttaggggtaaaatttatgtgtggtaaaatgcacaaaaattaagtgaatttggagaaatgtctatgacctgtagccattccaatggtaaagatatagaacttatttttcccctagaaggatgcttcatgttcctttccagtcaatcttcataccccaggagcaatcataattctcaattctattaccctttggtttttgccagtttctgatagttcttattaatagaatactctttattcttttctgtcttctttcatttaaccagtgtttgtgagagttagccatgttgatgtccatctcatagctcatcttttcaattgctaagtagtaattccactgtatgaatataccacaaatttttaattctttctcttcttgatgaacatttgtgttttttcaagtttgagactattattttttaggttgctgttcacattcttggacaaatcagtttgtgtatatatattttcatttttctggggtataaaacctcagaatggaattgctgtgtcataaggtaagcatgtatctaagtttataagaaaccgcccaacagtttttcaaagtggttataccattctactctctttccagcgatgcatgagagatatacatcatttgcaacgtttgactttgggatagtatctcgttaggtttttaattcgcatttgtcaaataacaaatgttgagcagcttttcatatacttggtcttttgcctgtcttctttgggctagtatctgttaaaagcactgagttatttgtccttttgttattgctggatatgagttctttatacattctgtatacatttcctttgtcagatagatgtattgcatctattttctattctgaagtttgccattttattttcttactggtgcgttttaataagcaagagtttttttttattttgatggagtctaatatatcatttattttcttttatatgtagtgctttttgtatccttgctaagataactttgcctactcccaaagttgggaagatattttctcatgttttcttttaaatgttctacagttttagcctttatatttagtttttttaattattattatactttaagttctagggtacatgtgcacaacgtgtaggtttgttacatatgtatacatgtgccatgttggtgtgctgcactgattaactcgtcatttacattaggtatatctcctaatgctatccctccccgctccttccacctatgacaggccctggtgtgtgatgttccccttcctgtgtccaagtgctcttatcgttcaattcccatctatgagtgagaacatgcagtgtttgattttttgtccttgtgatagtttgctgagaatgatggtttccagcttcatccatgtccctataaaggacatgaactcatccttttttatggctgcatagtattccatggtgtatatgtgccacattttcttaatccagtctatcattgatggacatttggcttggttccaagtctttgctattgtgaatagtgctgcaataatcgtacatgtgcatgtgtctttatagcagcatgatttatactcctttgggtatatacccagtaatgggatggctgggtcaaatagtatttctagctctggatccttgaggactcgccacactgtcttccacaatggttgaactagtttacagtcccaccaacagtgtaaaagtgttcctatttctccacattccctccagcaccttttgtttcctgactttttaatgatcaccattctaactggtgtgagatggtatgtcattgtggttttgatttgcatttctctgatggccattgatggctaatatccagaatctacaatgaactcaaacaaatttacaagaaaaaaacaaacaaccccatcaaaaagtgggcaaaggatatgaacagacacttctcaaaagaagacatttatgcagccaaaagacacatgaaaaaatgctcatcatcaatggccatcagagaaacgcaaatcaaattgcgtttatttgtttctcttgtcttatgcattggctaaaacctcctgtacaccactgaatagaaatggtgaaagtggatattcctgtcgtgtcctggtcttagggaaacaattcatgttcacaatttcagcattaaatatgatattaactataggcttttgtaaatgctctttatcagattgaggaagtgtctttctatttcttatttgctgtgagtttttgacatgaatagatgcattcatgttattaaattatgctttgaatgcatcgattgattataaccaggttatttatgtcttctagtctgttaacatggcaaattatattgattaatttttgaatctttaacctgctttggtttccctgagatgtgccctactttataattatgtattaaaattagtgtgttagtattttcttgtgaaagtttgcttatacatttttgagggatatttgtctatcaacttcttttctctaatattttggccaggtttgggtaccaggattaagctagcttcaaaaaataggttgagaagggtcattcctcttccagtttctaaaataatttgtgtcagattgacactatttctttccttatacatttgatagaatttaccagaatataaccatcaggcatagagttttctttggggggaagtttattgataataagtttaatttctttgagagaaatataactattgaaatattccatttctatgtgggtcagatttactaatttgtgtttataaaaacattttcattacatctaagttattatatacattaaaatagcatttaaaatttccttattatacttttaacatctgcatgttctatagtgatatctcctcttacattccagatattagtaatttatatattttgttttcttaaccactcttgttagggttcaccagccaaaattacctatgaaaatccgttacgttacccatcaagtatatgtgatattatgtatataaccctttatactatgttatcattttctttaacactttttttaatcaatattttttacagctcttatttcttacatatattcctatggaacatcaaaaaaagcaattactttttaatctaaacaaagtatttgtttttcagtgatcaattataaaaatatagaaatttcccataattttataaatatgtcttgactatttcaggttcaattgcatctaattctaagtaaatcatcactaagtatcatagcagcagaaagccataagattttaattcattatctctcattcctgaacatgcctccactcacccacccacatacctatgaacagagttaaagtcaaacatacatcaatgtgcatatgatactattccactgcatacaggaactcctacctgaatcaagacatatcccctttttattcctacagtggggccctcgtggaggtaaagtgcctgaatttcaggaaactacaagagatatatttcatcgagacaaagaaattcttactgattggaaagagcaatatatgtgtgaaggttggagaaaagagtctaacctgcaaaaaaatagacctaaccactataggtaagaagttgtatataaaagtatggttgtcacttttgggctacctgaaaacactgtgtctggacattctgtaggttaaaagtagacaaatagtggaaacaactggcaatagataatagctaattccctactgtaaatttttataataaatgaaaagcttgaaatttatactttcctgcagtgaaagaattctgaggatcttcaaacccaggtgtgaaagatagtgtttgtgcaaacctacatgaagtggctaactggagctgggcttcctgtcatccatcacaggtgtcctttccttccttatctgtcctttccttccttacctgtccttctcccaaattccttgtggtcttctccccaaatccccacaacattctgagtaagtttagctaacttatcaagttattttaaaaagcatatatgccttctctattagtcagagttttctacaaaaaaaaaagggaatcaataggaggatagatagatagatgattgataggagagatttctattaagaaattgacttttgtggttgtgggaactggcaatcgcaaaaatccataaggcaagccagtaggctagaaattcaggaaagagtgcagtattgagcctaaattccgcagggcaagaaactcaagcagattttctgtattgtactcttgagacagacttgcttcttcttcagggaacctctgtctttgctctagaggccttctactgatgaggtgatgcccaccacatcacggaaggcaatctactttactcaaagtttactgatttaaatgttaaccatgtcttaaaaatacttttagcattccctattcgctcccccttcaaccctcaaaaagaaaattaaaggtaagagagcaatactcattagagataagaaagagtaagaaacctagctcagctttgtctcagttttgtttcattaagatgattaaatagagagttaaagcagaagttccatgtgtgaacaattaacttgtgaaaaggcaaatgtagtagaaaagagacattaggcagatggctgtgcatgttggccacacagaagcagcattggccatgaccagtgtgggtcctggttaggggaagagaactgggtttgacaacaacagggtatctctgaggttataaaaagttgggttctgatcatttggagatgaggtccctatggatagggcaccatatctaaaggttcaccatttacattgcaaatatacattcagttctctgagagtgagcagagaaggcagaggttctcagtcttctgacaaggtcctggagcatcaggggagagcccattcttacaaaactccacaccagcatgcaagcccttacatgcacataagcactcacaacacaccaagagcctccaggtgacatctgccacctccaaatccccatatcccacatgctcaatgcacttgcagtctccatcccccagcagactgcaaatctgacatgcctcatccgaacggcaagggggagaggtacgtatggtacacacactgctgatggcataggcccctttggaaggggtagtgtgagtctcttggggctatggcaagcacccctggacaagcaggaagagaggtggtggaggcatgtctcacggtagcatctccttctaggtcctaatgggacacttcattaatggaactaccatttaagtgagtttaaactggatgcttctgattgagccccagagccagtgctccactgccaccacctgcaccctcacttccccttgtttaagcatcttccaacccagtaaggctgaagagggaagcttcctgccttcccacttctcttagcagagtagattgatatgattattcagattgtacaagaatctattccctctgaagtattgcttgatgaatgagcccctttttctaatttgctcaaagaaatcatttgagcttgaggaaaactgtccagagggcacgaggaccagccgttgtgatatgtaacaaggtagagaaacaaaagctaaatgaagaagagtgagcctcagaatcaaagaactggatttggatccctttaaaccattttacaggggcctgaatgtaattaacttctctgaaattcagtttccttatcaatatgctggtgataagtgactattgtttgaagacagcataagcaaagcatgcagtacttaggagatgtgttcttccttcaattcctctattattaaaagatgggcacagggcaggggcttcagctcagaaggccttgttgagaatagaatggagagcaggaacaagagagaggggcaaaggcattgccagcattctctgttcggctgttctccacccactgcctttcctcctgcttccctctaagtccagggcattttcccttttgataaacttccccttttacaacccatccaagggtgaaaaacaaagtcattacttttttttcagtacctctaaggcaaagcagcagaaacaggcagtcaccactacgaataagtgactacaacaagagctaggccaaactctgccatgtgggctgcattttattgggccggcaagtaactttaaatcccagctcacactctactgagtgaaagtctgatgaacccgcatcttcttgtgaacaactgcgcctgagatcagtcatgcaagaagtagcacccccacccccagacaactaacttcccaggctgtgaccaacaagcagccaagaggccaggacagggaagtctcaggacctttctaggaaatcaatacctttctctgggtttgttctgcctgaaataataccaatctccctccaacagcttagcatgtgtggagcatttgatactaacagcaaccctgcaaggcaggaaggcagtagggagaggcccaagaggaattcagcattaaggcagtgagactgacagaggggaccccctgaggacattctggaaggtcttagccagggccaggatgcagacccttcatgtcactgtagctgagacgaggtgcaaggttcacagcatataacctaattttattacaagaatgaagactcagagtttaaatactcctgctttggggctcattagtaacaagttctccaatattcaaaaggcaaagtggatgtgttttagtgtaaaattaacactagctgctgtaacaaataagcccccaaacatatgatatctcaaacaccgtaggtttatttctcactcacatcagagtcaaaatggatgtttctaacctgcagctggggcttctcccagcagtattcggggcactttccatcttgtggctccaccgtctgtaatgcaggactccaagtggtggaagaggacggagcagaggagtcacacatgggtgtgtgtctggcccagggtggaagtggatgtgcatttcttctgcccacctcactcacaaggccacaccccactgcaagagaggctggagaatgcggactggatttaaacccaagaagaagaaatggttttctgaatagttggccatttactgacacaaaaagggtcaaagtgacttgcagaggagatgaattttaaatactataattatttccttggctgccctttagacagaatttatttctttttcttttccagttaaacctgaggctccttttgacctgagtgtcgtctatcgggaaggagccaatgactttgtggtgacatttaatacatcacacttgcaaaagaagtatgtaaaagttttaatgcacgatgtagcttaccgccaggaaaaggatgaaaacaaatggacggtatgtagttcaactacattaataaaataaaaacttatgaatgttttctattttgttggcctagtagtgcatttcccctgggagggcccaacaattttgctttcaaaatctaccttctactgaaagaatctcccaatattggccccatgaaaacctggatcttccctgatgcatactcttctagctctggttgttttcttctgctctaattttggtcttcagaatgtttctacattagtgagttggataacaatatagattgaggccaaattaatcctctgtattcaggggcctcaaaaagtgtcatgtctagtgccactttcataggcaaatcaggcaaaatgtatatctgcttatgatcaccaagtcgtagccacattctggcttatgagattcatgggaccagcatgaggtaaagaaaagaggcataatgtttgcctttgttttgtttttattttaaagcccaaggtctttgtttttgaagtaacagcttaatttttacccttcataatcaggagagttacttagatgctctcttcatgatttgttgaggttggaatgatttggcagtccctgaaatttattttggggaggaggtggcagaagagtggagtgtaccaggttatgagatttctcttaacccaccaacctaacttctgttctttctgcacctcagagatgaagaagagatgatgatttctcttcctcaagtccttcttattcttgctgtcctgttttttcaggccaagattggccttgtttgtttgcagtgtgatgcaagatgccacttgcataaatgtaacaactgccccaaaccacctgctccctccttctactcacccaccccacccttgatcctgccatctttcattatacatctgaaaattgcaccaattgaaaagcaacttagtggagaaaggaaggattatgaataaatgctgccaggacaattagttaactaaaaagaaaaatagataaattcaataaatacatgaatttttttgagatggagtcttgctcagtcatccaggttggagtgcaatggcgccatcttggctcactgcaacctccgcctcccgggttcaagcaattctcccatctcagcctcccaagtacctgtgattacaggcacccgccatcatgcccggctaatttttgtatttttgtagagctggggtttcaccatgttggccaggctggtcttgaactcctcacctcaggtgatctgcccacctcagcctcccaaagtgctgggattacaggcataagccaacacgccagccaaaaattgttttaattaaaaaaaattaaactaaatgcctagccaccttcatataacaacaacaaaataccagatgatttaaggaaattatataaaagtgaaactctaaacaaattagaaaaattatagccaaatgtttacataatcttgacatgaagaagaacattctaagcatcaaagctgtagaagaaaagaaaggattgagacatgcaactacataaaaagtggaggtttatatatgtcaacacacacaataatcaaaaatcaaaaatgcaaatttaaaagtaagcttaaattgccacataaacagctgatagatggttagtatcattaatagataaaggactcttataaatcattaaaaaaacaaatatcacaatagaaaaatgagcaaaaaaattgggaaaaatctcataaagtatggaatagataaattcaataaatatatgaaaatgaactaattatcaaataaatacagatataaatagcaatggacttctttttatctgtcaaattgatagagtggtttttttttaatcttaaagataatacgctgtgtggtggagacttttgtctctttatcactattcacaatgtaaaatggcgtctttctggagagaaatgattcctgctcactaacctaacctaacctttcatctccccttaatatgtgaaaggatagagagaaaagaagaagatattgaagtgtggaaagggagatcctgggcagtgcctaactcacctgaataagacccatcatttcactctcctccttgaccactcacaacatcctttataagctcagattctgtccctaattttgctgttgactcctttacgtatcagagctccttattctaacaaatacgagacaacttcagagaatgcttatgggactaaaggaatcccaattgaaatgatttgggagatttaggcaacacctcttttcccatcctaagaatgtaactgcactctactctctagcatgtgaatttatccagcacaaagctgacactcctgcagagaaagctccaaccggcagcaatgtatgagattaaagttcgatccatccctgatcactattttaaaggcttctggagtgaatggagtccaagttattacttcagaactccagagatcaataatagctcaggtaaggaatggtggtagagtttttgttccctcagagtgctttgcatgtcaaagtgtgggagcaagtgagaggaagattgttgaaactaacctgcaaaataggacacccttggagggcactcttacactttctttggagaatgacttgcctgctgtctttgcgccttttgtgaagaacaaggaagcagagggagtggggtccttattagctgagaattagtacaagccatctgtattcctggaagctgccatacattttgaacaaaatccccacccactacgtccagttaaccaatttagcctgggaccccaatggctgctgtctctaaggcccctttaagaagcacctttattggtgtcaggtatgcaggcaagtgcggctgtcctatgtctccttttccagaaggatgaagatgtctttgggactggaactgagaatgtgtaggaactgagacatctcctccctaaaatttgcaacaggggtgaacatccctctcatcatctcctgctctggcttcttttccttggtagaaagtcaagaagggaagagagcattggtacctttgatgctagatcacgtttacatttcaagtggcagatgctctgggcctggtcacccaagtcaatgccttttaaaccaaaatccctccataaagctgtcaaatatgtctcttaactgaaaagcaactttcaggaaataataagtgggcccacattactaagtaaatgcaaagcaccctgagaccctacccccactgcatggctactgaatgctcaccacaatctattcttgctttccaggggagatggatcctatcttactaaccatcagcattttgagttttttctctgtcgctctgttggtcatcttggcctgtgtgttatggaaaaaaaggtgaccttcttcaactaataaagagggtgattgtgtgggatcacggacagtcagagcttaagccccatttattgatgagaaaaccacaaaggggattaaggcatttcacgaatttagtgcccagtatccctatctatcctcagcgaatttccacagttaatttcataagaggcaaaaagatattaactggacattaggcaaacgctgtccccaaagtaagaattccgtaatgcaatgtttcccaagcttttcttccagtatctcctaaaggttgcagaagccatcattcatggcaaatgcacaatgtacttgaagtcttgactttaagcatataaattcatgggattttttatactaatccatgctaaggctatgtttgtttcatcataaaaatgatgttttaaacatgcacttgttaaattacttactattctaggagaatgcccttggcagaaggctacatatccccaggattacaaataccctaatttgaaaagtactgcctggaaagtactaagcaatttccctgggtaatttgaaaatattcccccacttccaccaaaattagctgccagagttgctgtcagtaaagagaggaaataaaaagacaacacttaaattgggagtaaacaacggggttaaatttacttccatagctgcaccaaaattacctccttgcaagccttggtgttccttccctctagggctttttcccagaggtatattattgtcatgtcttgttcacagaatggattgatatctgtggtctctggtccaacccctccttgaattgatagggccccgaggcccagagaaagccagtctcttgaccatggtcacccacctaattgtgttagagccaagactagaaatctgttcttctgattccaagctcagaataagtgggaagactcagtgtgcctgtgccctctgccattcacttcatctatcaatgttctctgatttcaggattaagcctatcgtatggcccagtctccccgatcataagaagactctggaacatctttgtaagaaaccaagaaaagtgagtgtttttggtgcttaaaaagtgttgtgttggcaacatcccagtggccaagaatgatattccaggacaaggaacagttgaacctcaccttttggtatttgattcatcctgtaactagggtccctcctaagaccctagctgcagtagggaactgaaataagatacacatctcagaacttctgggctccctggggctggagggcacagccagtggtcacttcaagtcttgaagtgtctcagaagctccagaagcaaagagtccattgaggaacatgctggcaattctgtgacattccctgtcagaaaactctatagacctactcctgaactgaacatttgatggtgtgtctctctggtgccatcttaataccctttctcctttttctgtgcagaatttaaatgtgagtttcaatcctgaaagtttcctggactgccagattcatagggtggatgacattcaagctagagatgaagtggaaggttttctgcaagatacgtttcctcagcaactagaagaatctgagaagcagaggcttggaggggatgtgcagagccccaactgcccatctgaggatgtagtcatcactccagaaagctttggaagagattcatccctcacatgcctggctgggaatgtcagtgcatgtgacgcccctattctctcctcttccaggtccctagactgcagggagagtggcaagaatgggcctcatgtgtaccaggacctcctgcttagccttgggactacaaacagcacgctgccccctccattttctctccaatctggaatcctgacattgaacccagttgctcagggtcagcccattcttacttccctgggatcaaatcaagaagaagcatatgtcaccatgtccagcttctaccaaaaccagtgaagtgtaagaaacccagactgaacttaccgtgagcgacaaagatgatttaaaagggaagtctagagttcctagtctccctcacagcacagagaagacaaaattagcaaaaccccactacacagtctgcaagattctgaaacattgctttgaccactcttcctgagttcagtggcactcaacatgagtcaagagcatcctgcttctaccatgtggatttggtcacaaggtttaaggtgacccaatgattcagctatttaaaaaaaaaagaggaaagaatgaaagagtaaaggaaatgattgaggagtgaggaaggcaggaagagagcatgagaggaaagaaagaaaggaaaataaaaaatgatagttgccattattaggatttaatatatatccagtgctttgcaagtgctctgcgcaccttgtctcactccatcctgacaataatcctgggaggtgtgtgcaattactacgactactctcttttttatagatcattaaattcagaactaaggagttaagtaacttgtccaagttgttcacacagtgaagggaggggccaagatatgatggctgggagtctaattgcagttccctgagccatgtgcctttctcttcactgaggactgccccattcttgagtgccaaacgtcactagtaacagggtgtgcctagataatttatgatccaaactgagtcagtttggaaagtgaaagggaaacttacatataatccctccgggacaatgagcaaaaactaggactgtccccagacaaatgtgaacatacatatcatcacttaaattaaaatggctatgagaaagaaagagggggagaaacagtcttgcgggtgtgaagtcccatgaccagccatgtcaaaagaaggtaaagaagtcaagaaaaagccatgaagcccatttggtttcatttttctgaaaataggctcaagagggaataaattagaaactcacaatttctcttgtttgttaccaagacagtgattctcttgctgctaccacccaactgcatccgtccatgatctcagaggaaactgtcgctgaccctggacatgggtacgtttgacgagtgagaggaggcatgacccctcccatgtgtatagacactaccccaacctaaattcatccctaaattgtcccaagttctccagcaatagaggctgccacaaacttcagggagaaagagttacaagtacatgcaatgagtgaactgactgtggctacaatcttgaagatatacggaagagacgtattattaatgcttgacatatatcatcttgcctttcttggtctagactgacttctaatgactaactcaaagtcaaggcaactgagtaatgtcagctcagcaaagtgcagcaaacccatctcccacaggcctccaaaccctggctgttcacagaaccacaaagggcagatgctgcacagaaaactagagaaggggtcataggttcatggttttgtttgagatttgttgctactgtttttctgttttgaattttcttctttgttctgtttttactttatttagggggactaggtgtttctgatattttagttttcttgtttgttttgttttgtgttgtctgtgaatggggttttaactgtggatgaatggaccttatctgttggcttaaaggactggtaaaatcagaccatcttattcttcaggtgaatgttttactttccaaagtgctctcctctgcaccagcagtaataaatacaatgccataatcccttaggtttgcctagtgcttttgcaattttcaaagcacttccataagcattccttccacctccttgataggcatttatggaaagcctgctacatgtcaatcatactgttaggcacaggggacctaaagacacataaaaggatggcattctgcctcataaattgcaaaacctaatgaaagtgactgcttggtaaacaaattattattatattataaaatgctataaaagagccatattgaaagtgccctgttggagacagggcaaatgccacaaaaatgatgtaaatttacatggaggaaaagtagaatctgcctggtttgtaggcagcagaagacatttttcatcagtgggcaggtgttctttaccttttgtagaaatgggagtcaagtctcaaataggaggctccacaaaatctcatgccaggtctctgataccttattcacagaagttctttgaagtatttattgttattttctttgacttatgggaaaactgggacacaggaagacaggtaaattacccaacctcacacgttaagtcagaactgggagccataattttgtatccctggtataaatagacaatctctcgaagaaatgaagagatgaccatagaaaaacatcgagatatctccagctctaaaatcctttgtttcaatgttgtttggcatatgttatctttggaatttagtgtctgagcctctgtctgttactgtagtatttaaaatgcatgtattataatcatataatcataactgctgttaattcttgattatatacctagggacaatgtgtaatgtaagattactaattggttctgcccaatctcctttcagattttattaggaaaaaaaaataaacctcctgatcggagacaatgtattaatcagaagtgtaaactgccagttctatatagcatgaaatgaaaagacagctaatttggtccaacaaacatgactgggtctagggcacccaggctgattcagctgatttcctaccagcctttgcctcttccttcaatgtggtttccatgggaatttgcttcagaaaagccaagtatgggctgttcagaggtgcacacctgcattttcttagctcttctagaggggctaagagacttggtacgggccaggaagaatatgtggcagagctcctggaaatgatgcagattaggtggcatttttgtcagctctgtggtttattgttgggactattctttaaaatatccattgttcactacagtgaagatctctgatttaaccgtgtgctatccacatgcattacaaacatttcgcagagctgcttagtatataagcgtacaatgtatgtaataaccatctcatatttaattaaatggtatagaagaacactttgtggcatgcctgtcttctctggaaactgtggttagacggattcccagaatggaccacacatctcttcagctcctgaaaactcacctccccatgagtccatggaaaaaattgtcttccacaaaaccagtccctggtcccaaaaagtttgagaaccactgcactagaagacagcctactagtggttaagtctcaatgtgtcaatgtatttaacagagagaacagagagtgttgcttcactcaacaggtggttcagtggaagccctgcatggacacctatttcacttgatatacctagtccctgcagtctgcagagtagtggctggaaattaggcttggcagaattggtgggggccaatgattaagcatttggcatgccagcctaagaagttgtcatctattttgcagaaaatagaggggcttggcaggattttaatcaggaatgtgatgtgaaatatatattttctgtgcatgtgtgtatcaggttttaggaaggaatcttaattcagtaggatataaatataaaataattctgacatttctttaattacttatctccaaagatgctccactgaaaatccctttctgaagtagattcctttaagtgaccaaagcttaattcatctagttttaagatgcagtcttatattctaactaaagccacacacaccctatcataaccttgtggtgaggggaacttggaaagaaaggaagataatagcttctgttctcttgactcctcccccttcttggcctcttcctcctctcttcttcctcctctttccctttcccctcccccttcctactttttcttgttcttgttcttcctcttcttccttctttctttttctaacagcttaaaacaccacacatttcctatctcacaacctctgcgggtcagaagtctgggcatggcttagctgagtcctcagcaaggctgcaatcaaaatgttggcccaggcttgcttctcttccagaggctccattggcaatgggtccgtttccaaacttacttaggttatagtagaatttattttcttgtgcttgtaaaactgagtgctccagcttcctgatagctctcactctcggctcctaaagttcacccacagcctcttgtcatatgaccctcttcataagcttttgtgtttttttttgtttgtttgtttgtttgttttgacagagtcttgctctgttgcccaggctgctggaatgcagtggcaccatctcagctcactgcaacctctgccttccaggttcaggagatgccctgcctcagtctcccaagtacctggaattacaggtgcacaccaccatgcccagctaatttttgtattttttgtaatggagatggggtttcgccatgttggccaggctggtctcaaactcctgacctcaggtgatccacccgccttggcctcccaaagtgcggggattacaggcgtgagccaccgtgcctggcccataagctctctttcaacaaaagcttgcttcttcaaagccagcaagggagagtgagtctaccagcaaaatggtgtcttatatatgtgatatgaccacaggcgtgacattccatcatcttgccatattcttttggttagaagcaagtcagaagtcccatccatactcaagaggaggggattatataaagacaagattttcaggagttggcgatcgcaggggccacattaaagcctgtttgacacacaagctaactcagtcatgccgtttttagttcagtctcttattaaatctttagtcaaattcagatttcttctcctcccattctcctgagagttttagatacacggtgctatgaattgagttgtgtccccccaaaattcatatgttgaattcttaacatgcaatagctcagaatgtgactttatttggagatagtttctttaaataggtaatcaatttaaaatgtcattagggtgcagcataatccagtatgactggtgttcttataaaaaaaaaaaggaaaatttagagacagacatgcacatagggaaaacatcatgtgaaaaatgaaggcagagatcaggggtgatatttttaaaagataataagtatcaaagattgatagaaaatcatcagtagctaagaaagaggcatgggacagattctcccccacagctctcaaaaggaatcaaccctgctggcaccttgatctcaaacttctaggctccagaacggtgagacaataaatctcttgtttaagccactcagtctgtggtgctttgctatgacagccctagaaaatgaatgcacatggtactgggagaaggaatctggggccatgtgacttctttggactcccctgagctctagccttcctgtcttgtctgtggatggtatcccgtgttgtgtctactgctaatgtgtcagggcccatcatgttcctttgaatgtggatgatccacatcctgtctattaactgggtctctatgtgttgtccaggaagcttctttcagcctctagacttctctgcctcttcaagcatgggaagtagttggatcaaatttcctctttagaatgatccccctggtgaaggaagagaataggtcatatgacagctagactagagccgggacagatggacttttgtgacctctatgcccgcttaggggatgccacatcaggtccaaggtgagcctgaggctaaggccaagttggtctttgtgccacctttatctccttgtcagaaaagctcttccttcttttctgccacccttccatctaccagtacttactagttactaaatatctgaatatctgtttcattccaacaagaacatagatagtagaacttgtggggctccagggaaatccctaggccctggaaagagaagcttgcagttaatagctttctgggtgtcttcttactgattggctgagagttagataagctagagcttgagtgaagggcttttatccttttcctccacctccacaacatcttataatatggaatcagccagcctgcctgtcccaaggcctttgctcttgccgctctctccatctgaaacgtggtttctctggatctttgtgtggctggctccttcttattatccaggtcctagcttctacgtaacctccacagaagtggtcattctaatgaaaacaagaccctcctcctgatagtctctatcatgcctccctgtttatttcctccaaaactccttcctcaatattaactaccaattattaatcactaattcattactaattattaataatttatttttgatgattgttcttattgcctctctctgattctaaaattcaagttccatgcaagttccacttcctatattattcttggaataaaacaaatatttagtaagtactggtagatggaagggaggaagaaaaggaagagctattctgacagagaaagatggcacaaagaaccacttggtcttagtctcagactcacctttgacctggttgtggtgtcccctaagtgtgtacagcagtcacaaaagtccatctgaccctgccctagtctggctgtcatatgacctatcccccacccccactgggagtatctttctaaagaggaaatctgatcaagctacctccctaactaaaatcccttagtggctttccagcatggcacgtgacatagcttggattcttgtccccatccaaatctcatgataaaatgtaatccccagtattggaggtggaccctggtgagagcaccatccccttggtgctgtcctctcaagagtgagtgagatctcacaagacctggttgttttaaaagtgtgtggcacctcctcccacccttgctcctgctttcaccatgtgatgtgcctgctccccctttgcattccaccatgattgtaagtttcctgaggcctcctcagaagccaagcagatcttagcaccatgcttcctgtaagccctgcagaaccatgatccaactaagcctcttttctttataaattatccagtcccaggcatttatttatagtaatgcaagaacgaactaacacagcatggaaggctcttgatgatctagtgtattactttcttgtggctcctgtaataaattatcacaaacttagtggcttaaaacaatacaaattcatttattctcctgcagatcaggcatcagaagtccaaaatcagtcttctggggcaaaaatccaggtgtcaacagggctgtgatacttctgaagactgcagggagaatccgttttccagcttttttcatccaccagaggccacctgtattccctatcccacaaccctagccccttcctctatctttgaagtggactatttcatcccctgtttctatcatgacagtgccttctctcatattgaccctcttgccttataagattccttgtgattacactgggtccacctgcataatcaaggctaatctctccatctggagatcttaatataatcacatctacaaagtccctttggccattgaagtaacatatttatatgttttcattattaggatgtgggacactttgtcagggacagggatttttcagcctaccttttttcttcaccttttgccaccactctcagcctgtggtctcaattgccagcctttacacttgctacccccattgtctgggtagttcataccagtccctcaagactagcctcaggcattgcctcttctgggaatacatcctcttacaggccaggatatgactcatgggtgcattcctaatagcacttcacttatttctactgtcaccacactgatctgtaattacttgatttgtctgactcttctgggggcttgtaagcattctggcacagagaactatgacttactggggcttacatctcttgctaaacacagtacctaaaatttagtaggcattccctcataaacatgaatgaatgaatcaaagaatgaataaacatttaggaaatgatgttgtgttggtcaacttctttcctcatcactgttaaagataaaagaatgccaagccaggttgttcagacagaagcaagcaccacatccctgagagagcagcacatctgggcagccatgtgtgagaagtcggttgcattccccatacacagttgtctttgcagctgtactcttaaccactgtaaccacagaagtggggaaacaatagggtggggtgaagtgaaaagaaaattttccaaaacttcatttatctaataaatacagatatttaattgtgttttttcagttatttaattttagattcatatgaaattctaccctaatttctgaattttaatggcttgtggcatttgtgtgggcatttgtgtgtagcttgcaatgacacagctgttcagacaaagaaagtgtgatgcacaaaacctatgaggtccaaggaacacattcatgctcctcaagactcaggtaaaagtagtgaagcaaacaatatgcaaagcccctgaggattgaaaaataaggcttacatactgaattgtgctgaaacacttgagttcatctggagggcctctcaatggtaaattgttagaaccaatttgcctttaccctaagtaaagatttttcatcaagaagaggtggaaaacttacagagactgaaaaggaccctctttttatgataaattagttcctgcaaagtatgaactgcactagtcatgacacaaaaactatgcagaataatcagaaaacattttattattaagcttatccactgatagactgaaatattacttttagagcctaagaaagcattaatttaattagagcttcagtaaatgctatagtgtcagactgataaacctgtttgctacataattataaactttcatgaatttcacagtgtgaagttcaagtgtgaagttgccagtgtagaactgaatgatgcttaaagctttattttctcaaataaaaaattttaataaaataagagcagataagctagggtcatgctcagtggtgaaattttaaaagtactccattatattgaaggataagacaaaagaaattctattgtcacttcatttaacatggttctagaaattctaagaaattcaattaaacaagaaaacacagtaaaaagcataaatattgaataggagaaaattaaatcgtcattattggcagataaaattattgtatatatggaaaacacaagagaatcaagtagaaaacacactacaagacacagatactttattaaggtctccgcttacaatattctcatgtttattttttttaattcttatggaatctttacaactaaactattatttggttgtgtcctcaaattaaaaaaagatagacatgtaatgtatcaagttgaagatgtcactttctaatcacactcttcaggaatagtcacatttaataagtgacatttaggcttccagatgctcttctgtgcatacactattattctaaatatcttgcagagaaataaatgttggagaatagcctgcacaattccagagaagaaaagaattgtgaagcaactaaccattcacgtggttttaaaatttgattcagcaggaattcacagaactatcaatggtataaaacagagaatctgcaagtccagatctatgtaattacaaaaaattcatccatttctaatcagtagggttaaagtggattatttagcaaataagattggaataacacactagccatttgcaaatgaagaaaggtaactgacttcttatttcaaaataaattccacataactcaaagatataaataatttttaaaataaaaacaaatgctagaatacatggatcaatcatttcatattttttggatgcaaaaagcgtttctagataaaacgtaaaacctaaaagccataaaaggaaaagattgatatgtttgactagataaaatttagaatgctggtaatttctttactaaattttaaaaagtcacaaccaaaagaaagataaaaatagactggagaaagacagtaacactatgacaagcaaacttctgttatccttataagaccccagagtcttacaagtcagcaagcaaaagatgaagagcccaagaaggaaatgaacacagcacattaacagaaggctcacaggagaaataaaacaaactttaaaaataggaaaatgtgcgtaatctcattctgaataaacaatgctgataaaatgaatgagataaatgctt

SEQ ID NO: 1160 - DNA, 1658 bp, Homo sapiens
ctctctctctatctctctcagaatgacaattctaggtacaacttttggcatggttttttctttacttcaagtcgtttctggagaaagtggctatgctcaaaatggagacttggaagatgcagaactggatgactactcattctcatgctatagccagttggaagtgaatggatcgcagcactcactgacctgtgcttttgaggacccagatgtcaacatcaccaatctggaatttgaaatatgtggggccctcgtggaggtaaagtgcctgaatttcaggaaactacaagagatatatttcatcgagacaaagaaattcttactgattggaaagagcaatatatgtgtgaaggttggagaaaagagtctaacctgcaaaaaaatagacctaaccactatagttaaacctgaggctccttttgacctgagtgtcgtctatcgggaaggagccaatgactttgtggtgacatttaatacatcacacttgcaaaagaagtatgtaaaagttttaatgcacgatgtagcttaccgccaggaaaaggatgaaaacaaatggacgcatgtgaatttatccagcacaaagctgacactcctgcagagaaagctccaaccggcagcaatgtatgagattaaagttcgatccatccctgatcactattttaaaggcttctggagtgaatggagtccaagttattacttcagaactccagagatcaataatagctcaggggagatggatcctatcttactaaccatcagcattttgagttttttctctgtcgctctgttggtcatcttggcctgtgtgttatggaaaaaaaggattaagcctatcgtatggcccagtctccccgatcataagaagactctggaacatctttgtaagaaaccaagaaaaaatttaaatgtgagtttcaatcctgaaagtttcctggactgccagattcatagggtggatgacattcaagctagagatgaagtggaaggttttctgcaagatacgtttcctcagcaactagaagaatctgagaagcagaggcttggaggggatgtgcagagccccaactgcccatctgaggatgtagtcatcactccagaaagctttggaagagattcatccctcacatgcctggctgggaatgtcagtgcatgtgacgcccctattctctcctcttccaggtccctagactgcagggagagtggcaagaatgggcctcatgtgtaccaggacctcctgcttagccttgggactacaaacagcacgctgccccctccattttctctccaatctggaatcctgacattgaacccagttgctcagggtcagcccattcttacttccctgggatcaaatcaagaagaagcatatgtcaccatgtccagcttctaccaaaaccagtgaagtgtaagaaacccagactgaacttaccgtgagcgacaaagatgatttaaaagggaagtctagagttcctagtctccctcacagcacagagaagacaaaattagcaaaaccccactacacagtctgcaagattctgaaacattgctttgaccactcttcctgagttcagtggcactcaacatgagtcaagagcatcctgcttctaccatgtggatttggtcacaaggtttaaggtgacccaatgattcagctattt

SEQ ID NO: 1161 - protein, 459 aa, Homo sapiens
MTILGTTFGMVFSLLQVVSGESGYAQNGDLEDAELDDYSFSCYSQLEVNGSQHSLTCAFEDPDVNITNLEFEICGALVEVKCLNFRKLQEIYFIETKKFLLIGKSNICVKVGEKSLTCKKIDLTTIVKPEAPFDLSVVYREGANDFVVTFNTSHLQKKYVKVLMHDVAYRQEKDENKWTHVNLSSTKLTLLQRKLQPAAMYEIKVRSIPDHYFKGFWSEWSPSYYFRTPEINNSSGEMDPILLTISILSFFSVALLVILACVLWKKRIKPIVWPSLPDHKKTLEHLCKKPRKNLNVSFNPESFLDCQIHRVDDIQARDEVEGFLQDTFPQQLEESEKQRLGGDVQSPNCPSEDVVITPESFGRDSSLTCLAGNVSACDAPILSSSRSLDCRESGKNGPHVYQDLLLSLGTTNSTLPPPFSLQSGILTLNPVAQGQPILTSLGSNQEEAYVTMSSFYQNQ

SEQ ID NO: 1162 - DNA, 154504 bp, Mus musculus
  misc_feature (1)...(154504): n = A,T,C or G
gttgacttttagaagagaatctaaaaggttatttggaaagaacattagcccaataagaaaaggattgatctataaagaaagattaaaggactgtaagattagagcctagctaatactctgcttaaatttgagattaaaaacaaaataaaaacagctcttactattcttctgatcatgttcctttcatgtgaacttaaaccatgcatttctgaaaggaaaactgctaataagccttctctccgaggctttctccctttccctgtcactgggtcattaaagcagtaagttaccaaatctaaactctaaagagacctaaagtgttcaggggggaattctgaacagaacatgcagctcagattcgtgtttacccactttctggcactttggattcaggaccacatgtcaggtcccacccacagatgatctgggctcatagggcatttgcctagcttgcaaggccctgagttctatacctagcactgttttggatcattgattttgtatcctgaagatttgctaaactctcttattcatcctaaaggttccgtagtctgtgtcttcaagtttcttcgtggcagtctgtctctgcaaacggatctggttttcttttttttccttccatgcgagaaagtggtgagacagtaaattgctcccaatccctgaaaatcccagtctctgagtcagacaccatgctggtcacagctttttgtggataaccttcattacgttaatgcattcccattctatttcccatttgtggagtgtttctctcttgggtatactttctgcttctgtggagaaaattgtgtgggatttgtccttcagtatattgatgctacattttaaacattgtcctgacaagtattgacaacactgtcctgtggagcaatattgcttggtacctccccattaagcctgatcagaaaggctcagatcttgtagaagctttgctctaagaaaaacaaacaaacacaaaaactctttcaactgtgacaagagagataattcagcattggctgccctcgcagttttatgaaacttgagttccactgccagcttccaaatggtggctcgggaccctctgcaacgccaggaaatgcaaaatcctactctggtccctgaagttaccaggcatgcatgtggtgcatatatacgcgtatgtatgtatatatagtatacatgcatatatgtatctataaacatataagcacatgtatgtgtgtgtacatatatataaacacatatgtaggcaaaacattcatatacatgaaataaatcttttttaaaaaataaaaactcattcaaactcttcagaaatgtggctgtaacatcatcttccattgcttcctggagacttcactatctatgaaattgttcactttattgcactacaaatgtttttctccatctcatgcagtgtgactctcagtggactatcatgttactctttccattaactctttgtagtgtttcttctgttggactccagtactaaccatgttacagttgctttcatggcaaagtaggatttggaaaagtcatcacatctggtattttgttattcttgagtctatccttactgaactccgccagtgctggggatcttataggacagatggatactatcactgcccaagggtctcccaacttggtttagcaccagacagccagagcagatagagactgagtcatgtctttgaggaatgatgggtaattgagtgtcacagcaatgagactgttggcttcttgtcatgggccagttcatcatagtttggatgaaaagccaacactctgcttccaaaagatgcttccacaatccaggtcctatgtttaaagactactctgcatcctcttccaagtgtccacttccaaggtgtagtgcaggttttataaagaagtaaaaggcccgacttcatctgcaggaccttacaggtagttctggactacataacaacatctgaatccatgggagctggaacaatgcctcctagcctaagatctcttatcctactgctcttaaagaagaccagagtttggtttccagcatccatgccggggagcttgcaactgcccatagcttcagtttcaggaatccagcacctacttctggcctcctgacactgcactcatacacgaactcacactcacacacacacatataagcataattaaaaattaaagtctagtccttaaaaaaataatacaaaacacacctcggaatccatgggcttccgagatagttcacttgtaaagtgtctgtcttacatgcacgaagaattgaatcagaccctcaacatctacatcatccacaacaaaaaaagtcaggcctggtgacacgtgcctgcagtgtcacctgcattcccagcagtggggaagcagagacaatgggttcctggagctcacaggcttgccagtctagcctaaccagtgagttccaggccacatcaagaccctgtctcaaaaaccaaggtatgagcacctgaggaatgacaccaaggtcaccctggctgctacatgcactacttaatgctaagcatctccctccacacacaccaaaacaaaatctgaactctctttgtaatgtgctgtgtttctccaacaaatttttgacttgctatattagttttccctaactgatccctgttacctcatggagtaaaaaatactttgtaaattccagcttggggtttcttcccgccatttgtgttttccagatgaaagaggcacacagccttatatttttaatataccttaagcagcacaattgtgggcagctgcctaccctccatgctgttagaatccacctcctatccatagtccaagttattaattactatgtttatataggctgcttttagccctttgggcccatggcagctctggcagctctcctcgattctctatctcatggcggctcccttttaccctcccatgatggcttttttctctttcttatttattcttccatgtatacttaaaaacacttattaggtttcccaggctagagaccacaagaaaggagcaggaagagaaaaaatcctgctgtgtgtttcatccgggaacataaatggcccaaggcaggaagaaattctgcaccagaatttataaaatgttttttactataaccttgtttctctaaggtgggtcgatgtgtctatttaaaaatctctcaaactgggtgtggtggtgcaggacattaatctcagcacaaaaggtaggaagagacctatgagtttgaggctagcatggtgagttcctagccaaccacagtgagaacctgcctaaaataagtgttctctccctctcccctctccctctccctctccctctccctnnnnnnnnnnnnnnnnnnnngttagcttgctttctattgctgcgataaacaatcaaaagcaacttcaggaggaaagggtttatttggcctagataactggggtctcagtccactgagggaagccaagacaggcactgggaggcaagaactgaagcagaaaccctggtcactacatctctccagggcttgcttttgtttgtttgtttgtttgtttgttttttcaagatagggtttctctgtgtatctttggctgtcctggatctcgctccatagaccaggctgacgtcaactttagacatccacctgtctgtgccttccaagtgctgggactaaaaggtgtatgttgctatgccagtccagcttgcttttttttttttttcgagacagtgtttctctgtatagccctggctgtcctggaactcactttgtagaccaggtgacctcaaacccagaaatctaccggtctctgcctcccaagtactgggattaaaggcatgcgccactaccacccggctcagcttgctttttaaatacagctcaggactacctgtatcaagtaggtaagatggaccccagcacagaccctcagcagagatggaatggacagatgatatgcagcataggtacaaatgtgtgatcagttatctcatgaggtctagcatactgttgccttcattcttgtgtgcatatgtgggtccccatatgaactagacaccttagcacagtgttccttctgaataaggtttccttgagtccatagtagagcctcaaacacagaaggcagagttggttggcccttccctccgacagcccttctcagtaacttgcatttatccccttgccctacacacaaggtaccagcgaggtaaatcattgttccaactgtgcatatcaggacaccgagctttgtttgatttgctgaggtgtttgtttgtctggtttggtttggttgttgctgttgttgttttgcacacctgaagaatatcccataaagtagagcaactcatttaacccatttgcctggcccccagccttgctccacccacagacttcctattctgaagaatccccatagaactccctggggggaaacacccactttagctggcacagaccaaataatgggatcattagtaagtcagagtcttcttaaaattggaaggatttccaaatagctatttgtttccctggtaaattattggatcctatgggtatcttgggatagacacacatttgaaatatgtttccataatttataacttagcttttccaacttcttgggtgttttcactgtctgtaaggaagaattttctgctgtgggatccaagaccaaacatttcctggagactttgttctgttttctgaccttcatcttctttcttctaaagactgaagaagaaatttctgaccagtgcaggctgtcagcagcagcctgtggcccaaggttcaggtaaggaacacagggccatgaggccctggttatttctgggcagtaaggccagaatgtgttaaccctttgttttatggggttttattgtgttgttggtttgtttgttgtttttgactgcctctctatgtcaccctagctggctcagaactcaccatgtaggccagactgccagactgccctcaaactcagagacccatctttattcctgagagctgagactaaaggtgtgcaccatcacagtggccttgactgagattttatttattcatttattttatgtatatacactgtagctgtcttcagacacaccaaaagaggacatcagattccattacaggtagttgtgaaccaccatgtgggtgctgggaattgaactcagaaagagcagttaatgattttaactgctgagcgatctctccagccccatggctgagacctggagctctttatagaaatagatcttgcagaataggtcttgtagatgacatttgtttgtattctaagatttgaaactagttagttctgattttctctgatggtttgttaaaatctggatgggggtgtattggcttagcaattgggtgatagaattagggttgttgctgctttgttttgtttgttttgttttgttttgttttgttttgtttcgagacagggtttttctgtatagccctggctgtcctggaactcactctgtagaccaggctggcctcaaactcaagaaatttgcctgcctctgcctcccaagtgctgggattaaaggggtgcgtcaccactgcccggcttgttgtttttttatttaaaagatttattttatttatgagcgctctatctgcatgtacatatgcatgccagaagagagcatcagatcctattgtaaatggttgtgagctaccaagtggttggtggggactgaaatcaggacctctgaagagcagccagtgctcttaagccctgagctatctctccagccccagaattaggnnnnnnnnnnnnnnnnnnnnatctctgagttcgaggccagcctggtctacaaagtgagttccaggacagccagggctatacggagaaaccctgtctcgaaaaaccaaaaataaataaataaataaataaataaataaataaataaataaataaataaataaaataaatcttgaaaaacatccatattgagcccttcataagtttaaggcctatgtgaaattactgcccccacccccacccccagtcccaaataaaccttttgttagcttgctttctattgctgtgataaacaatcaatcaaaagcaacttcaggaggaaagggtttatttggcctagataactggggtctcagtccactgagggaagccaagacaggcactgggaggcaagaactgaagcagaaaccctggtcactacatctctccagggcttgcttttgtttgtttgtttgtttgttttttcaagatagggtttctctgtatatctttggctgtcctggatctcgctccatagaccaggctgacgtcaactttagacatccacctatttgtgccttccaagtgctgggactaaaaggtgtatgttgctatgccagtccagcttgctttttttttttttttttttttttccaagacagggtttctctgtatagccctggctgtcctggaactcactttgtagaccaggctgacctcaaactcagaaatcagaggtctctgcctcccaagtactgggattaaaagcatgcgccactaccacccagctcagcttgctttttttttttttaaagatttatttatttattatatgtaagtacactgtagctgtcttcagacactccagaagagggagtcagatctcgttacggatggttgtgagccaccatgtggttgctgggatttgaactctggaccttcggaagagcagtcgggtgctctaacccactgagccatctcaccagcccctcagcttgctttttaaatacagctcaggactacctgtatcaagtaggtaagatggaccccagcacagaccctcagcagagatagaatggacagctgatatgcagcataggtacaaatgtgtgatcagttatctcatgaggtctagcatactgttgccttcattcttgtgtgcgtatgtgggtccccatatgaactagacaccttagcccagtgttccttctgaataaggtttccttgagtccatagtagagcctcaaacacagaaggcagagttggttggcccttccctctgacagcccttctcagtaacttgcatttatccccttgccctgcacacaaagtaccagcaaggtaaatcattgttccaactgtgcatatcaggacaccgagctttgtttgatttgctgaggtgtttgtttgtctggtttggtttggtttggttgttgctgttgttgttttgcatacctgaagaatatcccataaagtagaacaactcatttaacccatttgcctggcccccagccttgctccacccacagacttcctattctgaagaatccccatagaactccctggggggaaacacccactttagctggcacagacctaataatgggatcattagtaagtcagagtcttcttaaaattggaaggatttccaaatagctattgcttccttggtaaattattggatcctatgggtatcttgggatagacacacatttgaaatatgtttccataacttataacttagcttttccaactccttggggattttcattgtctgtaaggaaggattttctgctgtgggatccaagaccaaacatttcctggagactttgttctgttttctgacctccatcttctttcttctaaagactgaagaagaaatttctgaccagtgcaggttgtcagcagcagcctgtggcccaaggttcaggtaaggaacacagggccatgaggccctggttatttctgggcagtaaggccagaatgtgttaaccctttgttttatggggttttattgagttgttggtttgtttgttgtttttgactgcctctccatgtcaccctagctggctcagaactcaccatgtaggccagactgccagactgccctcaaactcagagacccatctttattcctgagagctgagactaaaggtgtgcaccatcacagtggccttgactgagattttatttattcatttattttatgtatatacactgtagctgtcttcagacacaccaaaagaggacatcagattccattacaggtagttgtgaaccaccatgtgggtgnnnnnnnnnnnnnnnnnnnnnnnnnnnnnnnnnnnnnnnnnnnnnnnnnnnnnnnnngtcagcagtttagagcaccaactgctcttcctagaggttctgagttcaattcccagctaccaagtggttggtggggactgaaatcaggacctctgaagagcagccagtgctcttaagccctgagctatctctccagccccagaattagggtttttattaggagatagatgtctggtctgctgtagcatcctgccatcccagattggtaatcccagagtctgggagttagctcggttccctgctactgatcagtcctgttttctctctgtctctcctaggatggccactatctcaggtaatgtttcctctcttaaggaagttatagaaatcctcccttctgggctggaaagatgactcagcagttaagagcaccgactgctcttctggagatcctgggttcaaatcccagcacccacatggtggttcacaaccatccgtaatgacatctgacgctcctctgctgtgtctgaagacagctacagtgtacttatatatagtaataaataaatgcttaaaaaaagaaatcttgccttctataattttttattagatattttcttcatttacatttcaaatgctatccccaaagccccctataccctcctcctgccctgctccccaacccacccactcctgcttcctggtcctggcattcccctgtactggggcatatgatcttcgcaatactaagggcctctcctcccattgatggccgactaggccatcctctgctacatatgcaactagagacacagctctggggagtactggttagttcatattgttgttcctcctataggattatagacccctttagctccttgggtactttctctagctccttcattaggagccctgtgatctatccaatagatgacggtgggcatccacttctgtatgtgccaggcattggcatagactcacacaagagagctatgtcagggtcctgtcagcaaaatctgtctggcatatgcaatagtgtctgggtttggtggttgtatataggatggatccccgggtgggtcagtttctggatggtctttccttctgtcttagctccgaactttgtctctgtaactcctgtctctgtaacacaatggagtactactcagcaattaaaaacaatgaattcatgaaattcttaggcaaatggacgcatctggagggtgtcatcctgagtgaggtaacccaatcacaaaagaacacacatggtatgcactcactgataagcggatattagccccaaaacttagaatatacaagatacaatttgcaaaacacatgaaactcaagaaggaagaccaaagtgtggatactttgttccttcatagaatggggaacaaagtacccatggaaagatttaagtttttgagtctgatctgaactagcatcttaatggcctttcccatcccagtggctggtccagggccagtggatactagtaatatgaattggcgctggtggggctgtcctagactgccaagacaacttctggctgtgtcatcagtcatcttaagtctcaccacttctttcttcatcatcgtgctccatggatgcctcccgaagaaaatgattctcaattcatgttatatgactccagctgtgtctcctgttaccaggaaaccctcaccccacttcactcccgccccagacccacacgctccctaaagtctccagttactccaacctctggagatccattcattccacagggactagggatgcaccaggagtctgagggtggcagcaggcaaggagagcgtctttggccccgagctgggggctgcctgtagcgtggggcagctctgactgctgcctctccccgccttccccgtccccaaagaggacacccctccttccgcccgcccgcttccaacccttgtacggcaccgcctcctcgcgccgccctttcagggagcctcccaggcagccagcaagcgcggagagcgcactgggatgggacttgaaggcggcttctcaggacacggcgctggcgcgggattcttgttcgcgtccggggatcggtgcccaaggagctctgcggtcctctgcggggcgaggcggcggaccacggagactgacactcacagctgctcccctgtctctcttcccgggtgtcggcggcggtggctgcaggtgagcgcggcgcgctgacccgggagcagatgacccactgaccgacagacgcaaaatctgtccctctcctgggggacccgctgtctccctgtggagagtgggagagaaaggcggcgctgcaggtcccctcggccgggagaagtcccgccacgccgggccaggcgcgggacacatggggcggcagtagtacccgagggccccgcgggggcgctgtgcttcgctgcagggacactcagaacccctccacactgaccagggaatagggacttgttgagtgggtttgcagtgacaatcctatctaccaggtagaaaataacttggttcctcctgtaggctggtacctcaagaccagtgtcatctagatttcctttgctttctgtgtccagctctggcttccttgtatttcggaagagggataagaagagggcattttgtgttgctggaaaactggacgacagtttggggagaggacagaaaaatatggggacaaacccttgtaaggtctcccggagttggtgttctggagatactgtacagtaatcactgtggcgctcccacagtgcatctacaggatgcaattcccattagcctttgaggaatggacaacgaagctgtaagggtaaaggacagaggtttgggaatcagcaggcctcgttcaaaccccagcggccaagtttacaggctggagtacttggagacaaccagcaacacaatgcctcaattttctcatgcatctagaggggattataatgcctacaggattaaatgagatttcatggaagtacagagaatagttctaaaagtctcttactgctagtgagctctgctacccacctttctagaaaaggaaggaatctgtgtgaacactgaattcaccccctccctaattctaggacaaaaccttttgagggatgctcgaagatggcagataatgtatatgtgttagtggaatttttgtgcaaacgtccatttgagaacattctctctgcctgcctgcttgcttgcttgctttctttctttctttctttctttctttctttctttctttctttcttccttccttccttccttccttctttttttctttctttctttcttttctctctctttctttctttctttctttctttctttctttctttctttctttctttctttctttctttcttttcaagacagggtttctctgtatagccctggctgtcctggaactcactttgtagaccaggctggcctcgaactcagaaatccgcctgcctctgcctcctgagtgctgggattaaaggcatgcaccactacgccctgccctgccttctttcaaagtgataatttcacaaagccagccaagataccaaggtgagtttgtagccaggaaggtttcctctaagcctcctgtttattctgtttagaaggtttcctctaatgtttgttctcttataaactccattgaagaaggaaaggctgcaggttttcatcttctatctcccttctgttcctgctttcatttcagttgacagacttcagcttcagacccccacataaccagccagatctcttctataaacccaggttttggaggttctggcttccagagtccagacccaggtggtcaagaggcatggggcctgaagttcatcgctgaggatatcatagcataattgaaacctgagacagccttggataacaggcaggtcaaactcctattagctaagaccacgcatgtctgacagcaaaaggctaggtgaaagctgggcatggtggtgcatgtctataacccaacacttgaaatgcagagaggcaggagggtccgaagttcaaaatcatccttgattacatagtaactctaaaacaaacctggactacatgaaaccctttctccaaaaaccaaaaggggaaaaaaaaaagacaattggaatgaggctcaagattttaagaaaggcaaagagatgttgctccttgaaagacaaggaagaaaaatgagccactggagagtctgaaaaacaatttccagtttgcctagaagcagttcttattggtaactgagagaaggcactgagatatgggagtgtgaaggaaagagggggagaaagcttggtctcaggggaagctgagtgagtgagcagtgaccaaggagatgctgggatagatagagctcaatggagaggtaacaccagccccgccagcaagggcctttccagaagttgctctggcatttgcttgctggttctatcccatgcacaatctcctttcccgggagtcccagttctctgggggaagctaagcgggatttccttccctgtctaagggaacaaacacgggggatgacatacacagctctagggatggctgataccccagagagtggtgtacatcgtgttgctaggaaacagtgccaggatgctcttccaagagctctcagaactccagctcattttagcagtgcctcagagagtctgggtgtgtaaggcctagactgcaaaattggctgcagccatggaagaggttaggagacaggaaggaagccgagaggaaaaagtgaagtgtgtgcattcctgaatgtggtcaggatgcagagggcagatggaaactggtctaggtgtagacagctactaagccaaggagtcactctgaccatgaaaggacttgaggaagagaagatgagctccttgctggactagctgagtcagcagcccatcttcacctctagttggaagtcacagacaacatgtcaggttaacccagtaataaccagggtgtgaagtgtcgagctgcctatgggtagtctttatgttctagcatgcattggcttccggtttgctggccatgcaggagatggcagttctgataataggtggaaggaagataggaaaggcccagctctgagatttagtctcagcatggcctgattatatgtgaatacttagagtgaaggacacagttgccgaactgatgtcatctctctgattgcctgagaggtttcggggggccggggggggggtttcttcattgttttaccagtcaactagctctgaagccttggagggtctctagctataaactttagcgttctgttctcaaaagtaagatcttatctgctttggtggggatcaagcaaaaatacttggttccctgcctaacctgtcataggcactaagctaacattaatgttctttctacttttttcttttttttttttttaagatttatttatttattatatgtaagtacactgtagctgtcttcagacacaccagaagagggagtcagatctcattacggatggttgtgagccaccatgtggttgctgggatttgaactcaggacctttggaagggcagtcgggtgctcttatctgctgagccatctcaccagcccctactttttttcttaattatctacatttttattgtatgtattttgtgtatgtatctgtgttagcacacacatagaggtcagaagacaacctgtggaagttcgttccctgctaccacatgggtcagtttacccactgaaccatccccccagcctgccacttccttttcttatgtgaatggggcttagcattggctatagacttttttaggagagcagggttctgtgggtcatgcttaggtagagataccactttgttgtcatgcctcttactgatggttcattacataccagagagttgtgacacacaagtgaggtcccttgaatatagacagccagatctctcaagacccacagctcatttgttcttgactctggagggaccctacttttctggtgactcagatagtgatgcttagaaggtccccagctgttagagcagcctcctttctctgtcccaacctcttggtaaagcttcctaaaagaacccattgtctcatggaaaggagacaattggctaaaacaaaagtcaaagccttgcattatttcaaaacattctttctgtgccccctgctgcttcactggaggcagtttctcacacaaaagctctcatttgctcagagttgaaaggactgtccttaaaagtcttttaattttcctcttagggatgttacatatttttgagatgccaagagctataaatgccaaaccaagaaagtaccattgacttgaggacatgcatcaacttattattatgtgaaaaatccatattgtctgattataattatattacataatattgccattattatgtatttatatagtatcttttctatttttattaccataaattagtgaatatagtaatgggtttcattacaactcttcagacacatacccaatgcatttagaccatatttgcccccattatcctttcttgttcccttcctgatcccactgtgtggtgcatgacccaaccctaaccctcttttctctctctgtctctctctccctctccccccttctctctctctctgggtttgtgtgtgtgtgttttaagattggttacagaaatatggggtaagttacaatggctacaccactgaataaaatgtctctctctctcccaacaaccattagctacttagagatccttggggaggggcagggtctggaagcttgtctcccctgcacggggtcggagggggtggggcggatattaacaggcccacccaaccctgtgcaggtcttgtataggtaaccagaactgctgagagttcgcccatactatagccaggccatgcccagaagacaccattccacaatatttcaacccttcctcctgctcttcttcaatgccatttctttattttataaatagcttttttgaagtttaccatacagtggaattcattaattttaaagggtatgattggtaaatttcaacaaatatgtcactccatcataaccataacgtaaatgttcccatagcctcctagctctttccctttggctgctctatggctggttcccctttcttacccacaagcccattggtttgtttcctactcttgttatgtagttctgcctttattgaatttcctctagtcagagaattcagagcatagtccttttgtgtctgctgctttcatttggtgtcgtgctggggttcggctagcagagcacccctagttgctcagtaggagtccagtgtgtagatgctctgtaatctgtttcccactcatcagcggaccatctattgggtcactcccatgctcagtgttggaaagcacgacctctgcaagcatccgggaaagagttattgtgtggatggatgctcttgtcttctgactaagtgtgtagggtcaggactcagagaggacaacgcttctgttttcctggggtttgaagggtttcttaaggtgtggcctttggtgctaaaagtgtgggtgaatagagacagtgagttaccttttcccgtgttatttagctataactttatgaagagctgtcaactgtgctccagaatgacacaccgctttgcatgcttaccaacaaatcatgaaggttccaatgtccttgcatcttctcaacatggcaggcattgtgttatggtggctacctagcaggtttgtcatggtgcctcatggtgccactgtctgtgttttttttttaaacaataaacatttgaacgtcttttcatgttcttcccctagttatcctcttggtagtggtttgaataggaattgcctccacagactcatcctgtatttgaatgcttggccataaggactggtactattaggaagtgtagcattgtgtggagaacctctgtttgtaggaggatgtatattaattactgtggaggtgggctgtgaggtcatttatagtcttaagctatgtccagcgatacagtctcctgctgtctgctgactcttagctccttctccagcaccatgtctgcctagacactgcggtgattctcaccatgacaataatggactgaacctctgaaactgtaagccagccccaatgaaatgttttcctttataagagttgccatggtcatgccatgggtgtcttcccacatcaatagaaacacaaactaaaacattcttcaaacctttgcatattttaaagtggtccgtttttttattgaaaagagaatacatttttatattaactatacaaatacttcatcatatatatattcataaatatgttctaccagtttgtagcttaccatgtcatttccttttgaaatgagaaaactttaaatactttcagatatttatatatatttaaaaattgtgaattggaggctgatgagatggttcagtgaataaagttgcccattgccaatcctgacaacctaactttgattcctggaattgacatggtagaaggaaagaatcaaattttgcaagttgtcctctgagtttcatgtgcatactgtagcacacatgtatcatacatgtgtatacacatacataaaataaataaatgtaaaaagcttttaaaaattatgaacttcaatattgttttgtaagtaaacatattagctggttttatgctaatgaaatggctcaccatgacaaaatttgtcatgtatcattctgtactgaatggcttgtgtgcagaatgataagactagcagccagggctctgtagagcagcctggactcaaacagagctttgcctgtctctgcctcctgagtgttaggattaaaggtatttgacaccaccaggggctaagaagtttctttgataagaggtatgaactaaacttaactgtataaggataaatatttagagtatggttagaaactgtactggtttagtaaagttgtgtttaacccatttttaacattacattggaacttggcatggtggtggggagacaagagacaggaggatgtccttgtgagctggaggccagccagagttagatagggagaccctatctcaaaaaataaactccaacatcatagatcaacatgcacacataattggctggcatgcagaatgcagaatgataagaataacaacaaatatggctggagggatgactcagtggatgaaggtgcttgtcccccaccctgatagtgagttgagttcataatatatttttgtatggaacaaagcagattgaactggacaatattctactacacaaaacaaatcagaaacagaaaaataaatttcattaactcacagtgatgataccacaccatctatgtcgtagcaagttgtgtgattaatattgagtcattatgaaaacaagtaatagcttttaagatgatacaaaggaccaatggctggagagatggctcaattgttatagaaagtatctaatcccaatccaggatttctaccctgcctgtaaccatttagttcctgaataaaagacacatgcaatctctatgtttacaagaagtctaatcaacacaagagctgagcagatatctaccctgtatgctattaaaaatctatttcctatagctaaccttgaatttgttaactccaattggccatccctcaggtccatgttttcatgaactaacccatggcagctcctcctttctcctttctccttgtcctagtggttctctctcaacccccaaccccaggcctgggaaccctaaaacctgcctatgtctcttctgcccagctattggctgtcagcatctttatttaccaatcagaaataatctggaggcaagcatcacttgggtctacatgcagactctccctcaggggcaaccaggtcttagagacccacatttagcatcacaatacacagccagagacctttactgaggagcattgactgctcttgcaaaagactgaggttgagttcccagcactcacttgatgatgcccagttgtctgtaactacagttccatgggctctgttgtcctcttctggactacagaggtagtgcatgcatggggtattgcattcatgtactgcatagtactcataaatgcaggcaaaacacctatgcacataaaataaaataatttttaaaaatgaaaagaaaaatagcaagatagtctacattatcttcctttttcttttccgaaggaatctcagagttaaaggaataaaaagtagccagtctaactagaggactctaaactatttagatgaggaaagataggagttacccaaaatgaataaatttaggcaaattacttgttagagttagacactaaataaagagtgcctatctttaatacaatcttggtacttagtaaaaagtttcgggagttgacgggcttgagttcctcagcaggtcagcttctaaaagcaattcgctgaacagtggtgggggttgtttgtttaaattctggaaagtggtatttgccttacgcctgctcccttccttcctctatcagttaaacagcagtggcctttcatgaatggacacttgtggattttacattgggtcagtttcgttttctgctggattaatgttatacatgaccttggcaacaagatagttgatttcactgagcctctgggaatgtaggaagaatgctagcttaatgaatgagttaatccaagtaaagcatttagatgtgactggcagaggaacagaattccagccttagtcactgtgctgtgctccctcgtaataaatgtatacacgtttggtgtggtgttacatgataagctgaggcaggaggatgatgggttcaagattaacttgggctacatagcaatactctattaaaatagaaaggatgtaggaggctgggggctgggggcttgggactgaaggttgggtctggggtctggaggctggacgttgggtctggtggctggaggttggggctggggtctgggatctggaggttggggctgggggctgggggaacacaactggcactgtcatactacccatgtcagctgcacattgatttctagggacattaataattaattaataatttgtataatttgctattgataggcagaaagaccattattacctgaattctaggacctcttttccttttttcacatctaagatgtagaatgtgcctatgattaataaatagtaccttgaagtcaaaaaaaccgtcaagatagatttgtgatccaaggtgatgatagacttcccatggcccctgccagctcaagagaactccggaggacctggccaacgtgtggccccctcacgtttggaaggggcaaagtcagacaattagcatgtttgggacctgaaaaatcagggcaatggggcagcagcaccctaacatcagggacacccagaaatctaacttgcctttctcatgttgtattatagctgcagccctgctcctcttgaagatggagaagatgttggtggggtgcttgctgatgcttgggcagctcttccttgtcctcccagttgacggcagagagcgtccccaagccaggttcccttccagaggccgtcatgtccggatgtatccgcagactgcactgctgggtgagtgagaggtcctgcagttacaggcagtgtgtgtggtgtgtgtgtgtgtggggggggggnnnnnnnnnnnnnnnnnnnnnnnnnnnnnnnnnnnnnnnnnnnnnnnnnnnnnnnnnnnnnnnnnnnnnnnnnnnnnnnnnnnnnnnnnnnnnnnnnnnnnnnnnnnnnnnnnnnnnnnnnnnnnnnnnnnnnnnnnnnnnnnnnnnnnnnnnnnnnnnnnnnnnnnnnnnnnnnnnnnnnnnnnnnnnnnnnnnnnnnnnnnnnnnnnnnnnnnnnnnnnnnnnnnnnnnnnnnnnnnnnnnnnnnnnnnnnnnnnnnnnnnnnnnnnnnnnnnnnnnnnnnnnnnnnnnnnnnnnnnnnnnnnnnnnnnnnnnnnnnnnnnnnnnnnnnnnnnnnnnnnnnnnnnnnnnnnnnnnnnnnnnnnnnnnnnnnnnnnnnnnnnnnnnnnnnnnnnnnnnnnnnnnnnnnnnnnnnnnnnnngctatgaaggtgaagtggtttcagagaccgttcagggttgtgctaaagccaatgtttactagatatttagaatttatagaaaccacttcatttacttccctgaaaatgctccaaagccaactctctgcttccatttcacaaatgagggaatggagcctcagagaggttacccagtgagaaacagcagcaggacttgaatccagacccattccaaaatatgttctcactgcgtttaacagctagactgtatgtcagacctgacaatctgttggtattctgtatgtcttgtggcattttctttctggagaaaacatgtttattaaatggaaatcactgaaacctgccatttccattccctgtgtctggatgcaggctctgcctgtctgcattgcctgcttctccctataacaccatatgctggaatatggatggcattatccagacaagtttcatatattttctattctcataacacccctatcaaggcaagttcagtaaggatattttcagaagaaaactctttgcccttgtgtattagagcaaaattataagcccacattaaactcaaggctttaaaatagaagcttaattttaatttaaaaccttgaataccatttgcatcctcaatgcaagtgtcaattgccagtgggattcctccagtccacagcacagccaccagagtgctcagaggcaggagcctccccagcccaggcactctggttcagggacacacacacacaccacacacacatacacccccacacacacacacacaaaccacactgatggattgaagaaccctgctgatagggcagaacctgttctaactgaccaaatactaagcctgtctttattctcctgagagtccctgatttgtagcaccataaatgcatgccttctacatactttgaaaagaactggaaaatgtttagcatattaaaaattaaagatatttatatgataaacaccataaatatttaagtatatataaataactgaacatatcttgatatcctgtatcaccatctatgactgcatagttgggcttattttattttattttattttattttatatttcttatgatgttagaacggaaccaggggctttcacatactggggaagcacagcatcaccaagccatgtctacagcctcataatgagtttttgacttttggggatgagccatccctggtttaattggaaaagcatatgccttctctttcttctcttggctccaagtctgtctttctgtctttcacacacacactcacacacacacacacacacacacacacacacacacacacacacacacacacatctctaaattgataactctcaaccttctgagacaagaggtggacacttatctttccaaaggcatcaaaccccatgtagcaatagaaggagagtggccctgagtaacaatagaaggagagtggccctgggtaacaatagaaggagagtggcctccttgaaatcgtacagttgcaggcttagtccccagttggtgaattgtttgagaaggattaggaggtgtgtccttgtagtagaaagtgtgtcactggaggtgggattttcctttttattcattcattctttttgtttttgtttttttggtgggttgtgggggtggggatgaggaggtttgagatagagtatcagtgagaaacagccctgggtatcccagaacttgctttgcagaccaggctggccttgaactcacaaagacctgcctgcctctctgcctcctaaatgctgggattaaaggcatgtgccaccatacctggtggggatgggttttatgctattgccagttcactaactttctctgcctctcatttgtggatcagatatgagctctcatctgctgccccagggatatcttgtctgttccatgctccccagatggtgaccatggactgagcctctgaaactgcaaggaatcccgagttaaatacttttatttataagtttccttggttaggatgtctcttcacagcagtagatcatttactaagacaccccacaaacagcatcatcctctcttcctcgttttactgggaaatgggacagggacaaaggggtgggacaggctgtgtctgtagcctggggttggaagtggcatgctgtacgcagttgcctttctgctcactgagccttgcatactgaggttcccgaacatggagaaaagcacatttgctcacagaggatgctgaaagatagccatgaacctggaaggcaaaccctgctgctctggccagggttctggatcacagtctcttttggatggcactctgaagagaaccaggtggaaaagccaacagctgaccttagccagatcatgtgaccttctcttcatccttgttggggtccaggagtcactccaccaaccacacaaacactggtctcagtcagacatggatgggttattgaatgtacaccctaagactggtcaattaggctgtagctcaggattcgggggctgtaacaacctgtaacatttctcaaggcctgcttataaaggaaaaaccacaatgaactcgtgcaggtgcaggaagtgctgcctggtggtttgctctgactcaagatattttggatagctagacagaacagttctagatgacctttattgtaattggtcctaagtggagcttatgcttattgaaattcttaagattaacaaacctcagaatataaagaacataacaggatatgtgataaacatgaccttgctctgagtcaagttatttatctatgtcattgagtggcaggcatattacaatgacaatatgaaatagctggcaggcatggaacaaaatgtctacaggtatgctgggggagggagcaggcctcaacaatcctaaccgtagggaatcttctgtcttatgtgtatttgtttttctttctatgttcagaacgctatccagggcacactttccttagctctttcctttttattgccttcttttatcgactcttatcttgccttcttttgttgcctttctcaattcccacaagctgtatccccaatgggtcttgtacctgaagtgtgtggatgccatgtagagaaaaagtgggttgggggtccccttcatgggtgacaaagccactgttttctagtctcctatttccctcaagggtcagtcatgtgcctggtctttataactgatagtaatgacgacaatgacaacaatgatggctgccatgggggctttttgtttgttttacctgattttgttatttctcctgtgcatttcctgtctacctggcactgtgctagggcgattcacatttcactcagctcagtgccgttattcccacattgcaggtggtgattagtctttgagaagttgggtgttccgttcaaattcttaagaactactcagtggccagaggtagaatttggtatttcttctgcccagacccttacctatgaccttagacatcccctctgttccatctacctggactgggctcaccaattaggtctctatggaagcagccctaatctgggtccagattacaaaccatgactacattgccacagtcttgtcactaggctttgctggcaaagtggatccctgctttgaatccttgtgtggctcattgctgtttcagcagttcagcaatgagtctggtgtgccaaaggcacttggtgcatccctagaaagaggtaaatggcctctcagatgggcaaagagtgcctaaagagggaccactgggcccgtgaaggtttccatagtcagggaatacaggaaaaagctgacagaactggagcttgggaactcgatgggggtgctctgtgaaagctgcacattcttttcaatccatgagtgtgtgcatatgtgtgcctgtgtctgtgcatgaatatgtgtgtgcatgcctgtgtgtacgtgtgtgtgtgtgtgtgtgtgtgtgcttgtgtgtgtgcatgcatgtgcatgtgtgcttgtgtgtgtatgcaagtgaaagccagagatcaatgttgggtggctttctcaatcactttacacctctcttttttgaggcagggtctgttttagtgataaaataccatgatcagaaacaacttggggaggaaagggttgatttcagctcgcatttccacatcacagtttgtcctccaaagcggtcagggcaggaccgaaaagcacctaagaccacctgccctgggcgggtactacccacaataggctgggccctcccacaccaatcactaagaagaggcttgcctacagcctgatctaattaatggaggcacaatctcaactgaggctccctgagatggctctagcctgcatcaagttgacaaacggagccagcacagggtctctgtgtgaaacagagctcactcatttagctgtactggttactgtggtctctcacagcagttacagatgtgtgtgccgccatgcgtgccgccatacttgactgtttcattggtgttggggcccaaactcaggtcctcctgattgcacagcaaaagctcttacctacctcgcatctccacagtcctttgtctcctgctgctttttgagacaaggtttcactgttcatctcagcctctccaatgctgacatcaggagtgcaccacctcactcagatctagttgtatttgtgtttgttcaaattcaacattattttttctttttccctttctttttctttctttcatttatttttcttcttttcctccttgtcatcgttgtcgtcgtcctcctcctcttcctcctcctcctcttactcctcttcctcttcctcctcctcctcttagctttttaactccttggtacagcaagctagggttacatgcaaatttggcaagatgccttcagtatcttcaagtcacattgaaaatattaaaataaaatttgttaaaatttgtttaatctttaatgaatttttagttttgattacagtaggtcttactgtggcattgctgcatacctgtagcattctgtttcttctaactcatcccagtgactcacctccattcgtgttgctctcctttctctcccaatttagtccctcctgctctcacagaactctatttcattactctctcccaggtcccctgtgtgtgttacagctcagataggaaaggtatcccagcagtcaggagccaaggaacaccacagagcacctctcagcaagcctcacaggagagaaaaacccaggaaggtggctgcctctgtcagtgagaagcaccagagaaccgaacagaagacagggtttatacagggtttctggtgagaggtgggggttgagagagtgcaggtatatgagctggatatgaggagggggacttgggaaggaggtagggatgggatggaggtggtactggtatagcttttcaaagtggcctggattggagggattatgtgacctcatcttcgtgtaagctcagggattggttggattcttttctgtatgacctggtcactctctgatcccatggagctggaaatagctattatggcccttagagaagctggggtgcagagaaggaggtagggccttgtctttggagcccctgggagtaggaatgggtgggggctggccattcaagtgtctctagggggtcaggtctagtaccagagcattttgggggtggagcctgtccactggaggtcttcagggatgaggcctccaaaaggaatctctgtatgccccactgcctgcccacaccaccagagtaggtgtgaatagccacagtccccccttctgccctccctctccacttctttctctctccccctttactctcatgttctacacacattcatgcacacaacacatacatatacataaatttaaatcgagattttgcatgcaagagaaagtgtggtattgatctgtcatttctctttttaaaattccatttctatctctttttctgtgaatgtcctaagtttaatgttttcaaatgttttattcacttttttgatatatcacccccattcctctcttaatttcttctagatggctccccactttccactcttcctaattttgtgctctgtctttttaaatagtttattgaagagacacttcaacttatgctgcccgtataccatgatatcttaaaataaatactttatattctttttaaatgtttatataaagaatgtcatttacttttaaagatcacatctaaatacttaatgaatattactgaaaaatgcaaaagagcttgttttaaacattacacaatatttactgttttcttgaacagaaatagtacagacttgagtgatatgccagtttgttgaagcctccagaagagaggaccatagatggggggatttacaacagcacaaatatattgcctcataatactgaaggttgaaggtctgacgtcacagtgttggtagtctggcttcctctgaggtctctgacctggccgtgtagatatttgtgttgctcctgtctgtgtctttacacaggttcttttcatgtgcctttatgcatctcaatttcttcctttaaaaacattaacagtcatattaggttaccctctttgtgacctcattttaaacaagtctcaatttgtgtcccaggctagcctgggtctcactcactccataatctagactgccttcagattatttatgatagtcctcctgcctcagcctcagagtacatgtgggagccatcatacctgactctttataactttttgttttgtttattttgttttctgaggtagggtttcatgcatcgcaggctgacttcaaactcactatgtagctcaggatggccttgaatttttaacccttccccttctattctagtgctggggttatagtgtgactcctgactcctatacctagctcttaatgtaagagcttattttcaaacatggctaccttctgaagtatggttcaaatttcaatatgtaaattctcagagggttctgttaatctcctagaaagtcaatacacttctcactcttctggtttgtctcttaaatagcttgcttcctatttctgactcacctgatgtgacatatgacttctgacatccccaggcacactcagacttcagtagagtggtacttattaatttccagttgcatctttgagtcactaaattgagcctaaccttctaccatacccagctataatcctgaggccacagatgggaactgggcataatgtaaccaggtggtgaaaaccatggtttgagggatatttttttcaaaatccaaaaatgagaacctcaaatgagaaagtattgcttctatacatgcaagtggacagggaaatatgaaagagaggcagtgtgtgtattttggctgctcagagtttggtggggccaggaagggagaatagagatgttctcataaatcccagagccagcaagtaagtccaagcttcaaaggaagatctgggtgaccaaatgcacaaagagctgaagcttgggaagggctgtgggaaacaaaacaaatgttggcgttggatggtttgagctcagagccaggaggggcctatggaaaggcatgatgggttatatgtaatgtgggcattgggccatgggaactagtccagaggctcttcaaatcaggttgaaccatgagggctgcattcaagggggctggatctggcaaaggcagtgggaacctgccatccatgtccagatcttcattccccagtactgactccagggacggtgcctctctatttgacttacctagtaaagaactatattttccaggaccccttagtcccaggactgagtttggagcagtgagaaatggaaaatccttgcatcttagagaccggtgggggtgtgctgctcacctgagtgcatctagaatcaggtgtactctccgtttgtcactgtatcatgatacactctccagagttcaggcttgagaactacacaattgactctctctctctctctctctctctctctctctctctctctctctctctctctctctctctctccctctttcctcctctcctttatataggcaactcttgctatttttcattgagctgcactcataagttatccttgacatgtaagccatgtgttggagatgtctggtggaccctggtgttctgtgactgtcccagcttctaaatgaagcagtatttccactcttctaatcagctttttgtcttcaagatgaggaaatccatttatcttacatagcatattaggcatactataaatcacctaggtctcatacactttgcttgtttctttcattgatttgcctggcttttcattcattcaacaaaaatactgggaccctatactgtgcaagcattgttctggatgtcaagaatgctgcaggtcatgccaaggtcacaaccaactcgctgtgttttgctttacaatttggtcaaattctaaagcctcaagtgctaagagttaagaatttggggaatttcacaggatcagtaaaagacattttgggttgtattttgtttttgtttttgtttttgttttgtttgtttgttttaagacagggtttctccatgtatccctggctgtcctgaaactcactctgtagatcaggctggcctcaaattcagagatctgcctgcctctgctttccgaggactgggattattggtgtgcaccaccactgcctagtgggaatagatgtcttgattaggatttctactgctgccatgaaacaccttgccccaaaagcaagttggcgaggaaggggtttatttagtttatacttcttcattgttgttcatcaccaaaggaagtcaggacagaaacccaaagatcctggaggcaggggctgatgcagaggccatggaggggtgctgtttactggtttgctccccatggcttgttcagcttgctttcttgtagatcttagcaccaccaacctaagaatgccaccacccaccacccagagaggctttttcctctctgatgactttagcttatgtcaagttgacacacaataccagccaggacagagattttcttgacaacttattgaatttccttgaaagctattcattaatttggcttttgttacttattttttggtctcctctggtaattggtttccttaaaagctgctccacttatctacatggtcaagtttattggtgtaaattgcacttcccaacattgagccacagtttaagaagtgacacagtgtcctttaacaaaacatgcccattttttttgttttcagagatcataaaacttttagcagaaaattctggagaaacattgagacctcaggataggcttgtgttttatatatatatatatatatatatatatatatatatatatatatatatatatatatatatatatgagccttggtttccctgtaagatttggccttgatgacagagcttcaacaaacacaatttcttatcttacaactctcttgaccctttggcccacctaatgactccagcttctcagaagtgccacagctgggccactgctgagcccatagtgtgagcctacaccccagagaggtggaggatcatctgccttcttggaacagtaggctttcagtgatggagggtccagtgtacttggggccagatatgggggctgcctataggattgtctgtagttgttagctaactcacaccaaggaactctgagtttcctgggatgctacagaccctgtgggatgcgggagtccctagccctgtgagaccttgatttaggttggtccatccttctggaaaaggaggggccacatgtgtgctgtctaggcagaaggcatgttcaggcattttctgacaatctcagtttatcgctctaagctatattttaataggtgccacaacaaagaaaggatccagtgttttctttccatggatcataaagcttttcataaaatctgaagaaacattgtgacctgggccatgggtgtgactctgggaagagaagctgctgttgactcttttgttcttatcactcctgtcatttatgggagagctttacaatttagagtacttattgttttgtcttgtttctcttgatctcatcaagtccttgagagttagattttatcatgatgcctaatttatagataagaaaatcatgacctgagatatcatcttcattgcttttctattgctgtgacaaaacactattacctacactgttagacaatcaagcttttaattgggctagagttcatgatggtggatcaaaagcatagtggcaggaagagctgggggtttatttatccccaggtaggagacatagagatctaactgggaatgtgggagtctttgaaatctcaaagcccacccccagtgatacacctcctccaacaaggccacacctcctaatacttcccaaacagttccaccaactggggaccaagtatttaaatatcaaggcctttctcattcaaaacaccatagatgtttaagcactcaagatggtcagatgaaaccagaaaccactccttgatgatgtcattttatttagaagaaacagtattctacattaagaattttttaaaagatttatttattatatgtaaatatactatagctgttttcagacacaccagaagagggcatcagatctcaatatggatggttgtgagccaccatgtggttgctgggatctgaactcaggaccttcggaagaacagtcagtgctcttaaccgctgagccatctcttcagccctacgttaagaatttttaaagagatttatttatttatgtacatgagcacactattgctgacatactaccagaagaaggcatcagatctaattacagatggttgtgagccatcatgtggttactgagaattgaattcatgacctctggaagagcagccagtgctcttaactgctgagtcatctttccagcttcttaacccaagttcctcctgtggaatggaccttaaattcaatctgcatccctgacagccatgtcattattccaccagcaggcacatttcccttacatgttgatatggcagcacgtatttttcataatcaagcaggacttatgactctctcccctcagcctacaggcactacaaaagctactcaacaatagaggatttcaagctcagttctagttttatttttttatgtcctacagccaaagtaggtacggtttttggcaacaagtagggtcttaacatctagttctagcttataaccaacagcagctgctatagaccttatggtttatgaagaccttggaccttcctgccaataactcacagagagctaacccaccttggcactgggatattcaataaaattatagcttctggactttattttttttttcctatccatagaaaatctgtttaagtcttttgactgctgttcttgttgttcttctacatgcctttaaccatctgtaaaatgctcaagggttaacattatattatatataagtatataatatgtaattaaagataaatattatatagttatataattatagataacattgtacaatatataaaagcctttctaccacagtgggcaggacctctgaggggccttcacaacccatcccaaataagtgccaaatggtttggggatttcatggctaggaggatactacaaaatgttaacaaggatcccgtccctcacctcaattgtctcctcagaagagcagtgttgggcacagggctgcagatccagcacaccctcatctaactctgtaacactcagccattctccatgagctgccctatgcccgtgtcttggcattgctgaagagctgccacacaccacccaacttgaccggctagacagtgtgggtatgtgcttttggttctccttaggggcaagagggagaggggctgtgctcttgcctgttattcccatggcttgagctaacctctccagtcttacatgctggagccagaacatttctgctgtctttccatcagccacatctggatgctaaaagggcccagagttgagtgaacaatctcagtgtactttttgcagggaaaaagtgtacacagttatcctggaggataccacctgggacaagctttgtcttttctacctgtactgttttatcctttaagacttccactgaagttttacgtaggttttaaacccttccagaagcccacaaacactggtcatttcctctatcccaggacttctggatccatatagatcttgccacatttgcttttgaccaacctactacttaaccctacttttggtgataggagggaggcactttttgttgttgttgggtattttttgctctctctctctctctctctctctctctctctctctctctctgttttttgagacagggtttctctgtgtagccttggctatcctgaaacacccctgtacactaggctggccttgaactcacagaatctgccttcttttgcctctgcctcccgagggctgggatcaaaggcatatgccatcactgcccagctgccccactcattcctgggatggattgtattagcactttaagaatctgatttacatgacagcctgagacatttgggtctagagaacctttctaactcataaacatgatgtttcatatttctgcaaagccacaaaagccccattatagtcccatgatcccttctaggttatatcctttccaaatgctcccgtgaataaagttctgccaggtccagtgaactgggcataacatatccagcctctaggttttatgtgtcccttctctatcctgatgcctaatactcattgagggcctagtgttcctaatggcataaacccattcattagtgacgaagttcccatgttttgcatcaagttatggagcctttgtcataagaagggatgagtagttcaaaggaatgacagactttcacttggcttttaaaggatcagcctagctgtgtgatcaaggttaggatgaagaggacacaggcaagctctgcccaggggggtaaatatgcagtccaggtgagggctaatggtagaggtggaaaatctctgcagcgtaatgggggaactcagcattgttttatttttttggcaatcccaaagttttctttgaacattactaggttgttgaacgacctatatctcaggatacactctgcagttacaactgggcaacatggacgtatataaggttcaacagataatgttcttgtacagttgtgtgtgtgtgtgtgtgtgtgtgtgtgtgtgtgtgtatgtatgtttgtgtgtgtgtttgtgtgtgtgcgtgtttgcttttccagtacaatcataggaactcaagtcagatacatttgagttctcaaccaccatttactatctgtgtggtcctggacctctcagagttatagcttcccatctgaaatggagactatgtaaggaataccaagctagcacattctgttggtctataatcattaccccataaatattagctagcatagatgtggctagaaccatgaatagagggccaaagaacagtttttacttttttttttttaaactgtagcaaactagagctgggaagacataccatttattccaacacttatttcccaggaaaggaatagaaaatgatagagtaaatatatgtggttagtgtcctctcactaggtgaagcatgcaggtctctggactttcagggtgcctgcctcttccatacatcactaccacagatcttaatgtgctcctaggtgagaatactaaaaacaatagcaagttatcaagattcaccctctgtatgcannnnnnnnnnnnnnnnnnnnnnnnnnnnnnnnnnnnnnnnnnnnnnnnnnnnnnnnnnnnnnnnnnnnnnnnnnnnnnnnnnnnnnnnnnnnnnnnnnnnnnnnnnnnnnnnnnnnnnnnnnnnnnnnnnnnnnnnnnnnnnnnnnnnnnnnnnnnnnnnnnnnnnnnnnnnnnnnnnnnnnnnnnnnnnnnnnnnnnnnnnnnnnnnnnnnnnnnnnnnnnnnnnnnnnnnnnnnnnnnnnnnnnnnnnnnnnnnnnnnnnnnnnnnnnnnnnnnnnnnnnnnnnnnnnnnnnnnnnnnnnnnnnnnnnnnnnnnnnnnnnnnnnnnnnnnnnnnnnnnnnnnnnnnnnnnnnnnnnnnnnnnnnnnnnnnnnnnnnnnnnnnnnnnnnnnnnnnnnnnnnnnnnnnnnnnnnnnnnnnnnnnnnnnnnnnnnnnnnnnnnnnnnnnnnnnnnnnnnnnnnnnnnnnnnnnnnnnnnnnnnnnnnnnnnnnnnnnnnnnnnnnnnnnnnnnnnnnnnnnnnnnnnnnnnnnnnnnnnnnnnnnnnnnnnnnnnnnnnnnnnnnnnnnnnnnnnnnnnnnnnnnnaaaactgaagaccacagagacgaatgttcttgtccctggtggagaagcatggtttggagacaggggcagactaggagccagaagcctcaacacagcatggggttcttcactggaaaaataaaaaggtcgaatctagcctttaaagtgccccttttagttttaaaatgtttatgtcccaagtgcttgatgatcctgggcttgaagaaatgctatttcagttcatcagcttgctatcttacttattataatcagacctcaagttaatgatcaactataagaaaggctttttgtaaaaccaaaagcaccaaatctgtgtggtgcagattcccagcatgttatttctggcttccatggcaaccctaacattgggtggcaatctcaaagtagttgaaggcagcagatggagacagagcatttgctaaactgctatgagcagcaaggaaacaaattgcttgcccaatagttttccttttgaataattactgtccccatgtgttgagggagttgaaactgaagccaagttaagtaggagtggaggaaacaaagcgttgtaccaaagtggaaagaggacaagttttcaaacaagttacgaacagccagccagggagtcactgtagagaggggtagagggatgggtattcagaagtgctaggtgaccagaaggaagtgaagacagtcagtttccacaaagcctggagaagtgaactgttctcaggagtactgagtgtgcttggttggattgttctgcctcaacaaattggagcctccacttggaatatcctgaggacagacaaggcattaagcagagaggtaactattgagaaagcagattgtactaggtaacaagcagaaagagattcactataggaagctgggcgcttgcacgatagtaggaggaaggggtgtgcagttcactacactaatacacatcgctctggatactgtcaccacaatccaccaggattctggtgagccatactactgtcactgtaatctacagggatgctggtgtgccgacactggaacaccaagtttgttgctgtagtgcactgtcttctacagtgttagcagagctagcctctatgtctcatcctttgtaaccgtctgtgtctaatagtttagctcattcttatcccaaactctagctgcagtggactctggtaattgtagtttttccctttaaacttctgtagtatttgaagacttggggagagatggtatttatgagttgatgttcaatcaatattgcttttgaaatttggaactaggtataggataagttgagaagccctcacagtcaacctgaagtttctccttcaattacctaagcaaggtagacttattcttgtggcagatatgcaactcctaacatcaggaatttaaaatagtttctctgggtttttgttttaggcttatcaatagggagctgagaatttaaacctgagaccttgttgaggaccttaaaggaccacacaggttggggacaggcatggtgagactgggttggaccaggcatgaagtctgggctaagtgtgtatctgaagggaggataaacacacacacacaaacacacacacacacaccacatacaccacacatacacacaccacacaaacttttctataactccatttcagctccttattagtgactatatgtgaccccagacagctctgtcatcctgcctctttaggatccagccttaccacccactttcggttccttgtatacctgggtagtacactctggtctggctttgagcctgcactcataactgccctaacctgtctactcaatcccaggcctaactcagtctatcatatcataaacttgtgattcatgctttttaaaaacctcccaaatatgccttctctgtgattcatcttggtgagactgttatatggtgtctttagaacctggtacaagagtacctgtgtttgtacagttgaaagtgtctctcttgctggtccagtgttcagagataggtaccctgtcatacaactcatctttactctggggaaaagacaccaggaccccatgccatgcagctgaacatatagggcctccttctcctcctggcttgaagatcttagctattctgcattactgttcacaggtctctctgccctgctcctggcttccatttgctgaactcttagagagcagaagaggctactgctcaaattcttacgtttgagtgcccctataggccagtgtctaaagtaggctttagacaactagttatgttatatgatgctctatagagagcagaagtcacatagcttgtttcccaggaagtgcttggcacatagttttatattagaaaatgtgtttttgtgtgtgtgtttatgtatgtatgtgtacatgaacatgcagatctgtggactctaatggaagatagtactatttctcaatttaagaaaaaaggaaaaaactgctcagagtgtttgagaataatactaagttgttttttttttctgtttttattctgtcagctcctattttttaaaaggatctaaagccaccgagtatgtatgtgtttgtttatactctatcaattacaggaaagtttgtgcagcaaactctgagaggacttgttgagcatttcttagtgaggttggagcaaactgctttaccttgcaaggaaatttcagttcattggaaaatatttctccagggctaaactagggcagccttttctttggctcccttgtaaagaaacccatccagggctctggaagccacagttgttgaagttcaaatggtgccgcctttcaactcctataatacttaccagaggagactggtgtgatgtggcattttttttcctttcccttttcctggctccttggtgcatgctccctgagggccttagagagctgtgttcctgaaggaatttataacagcaatgggaacaactgacatttgagctggtgtcaactaggatccatcagggggccccttgccagtgactctacttattaagcagtattgctatgcaaagatgactgacaactcattaaaatctttgtaaaataacagaaaaagaaacaagtatatttttgcaaggacgcagcctatatgtgtctgcaggttgaaaagaactcacccataaggggtttctcccaatacatttgtccttctgtacatttctttctgggttaaagtgcacacagagcaagctggacaatcccaagtcttcagctttggacttgggttccattggtatgtattaaaaagaacatacaggctattcagacagtgtgttgggtattcctgggggaagctatgatctaagtaagttcaatggtatcagctgcatgctctgcacaaagagaagaaaatttgaatgtctggcagaaaggggagccaagctattatattttccctttcttcagtcatgttctttttatttttaccaggcattccacttgggctatggagggatggccatgaaccatgagcattgtctcgtcttgatgtatgatgtgactttcattttcagtggtggaccaggactagagattgtgtggcttgtagttgcactgggttcatggaatactctctgagtctttcagtcagatgtcagttctctggagactgtgatcagcataggatcttctggtaaagcacatatgatggggcttggacagtagctcatcacactctgccttgctctatggtcactggtatgcttacttgtatcagtgagcactttgagtctccttaaactcagataagtgcatccaactacctggcatgtcttaggatgccaacgtccccacagcaccaggcactcacttttgcctttgatgccttcagttcaccaccttctatgtacacatctgaactaggctgtcatgcaatggcgatgattgcagtccactgtatgtcaaagtgtagtctgatttgtggggcttctgggccagcaaacatcatgtttatgggatgatactacacagcatgtgtcactacttaccctgggatgcacagcaggtaaatcttgtgacattggttctattttattgtctaattctcctcccagtctcaggtaccagttagtgtgctatctgctgactaggagggtaaggtaccttttctgtgggacatttttctgttgaaaggaaactacatgctaggttacctactgcagtgaaacagtggttgtaaatgcaaagagtagataggttttcaatttctttccaccatttcctatcaaccccacgtccatggacttgctagagaacctctaagtctcatctgccctcccttccttctcacattccttcctgtgcagtagtgggtctaccttctttactgtctgaatcaaactggagactatggcatagctgtcacatacatgattcagcaatggaacgatatttgcaccaggagacatgagggaatccaggatacagtgtcaccatatttctaagacctctcctggtaatggagacacaggcatggagtactctgctgcaatcccctcttctaggcacttggcaaatggcctctcatgaccacatgtctctagagaccgagttctcaggcttgtgcccaagaaccacctggaacgagtgctgattcctcgcctgtacaggatctgactcattaacttcaggactcagcatttttaatacatttgccaagtgtttctgacatcaccagaccactagggatctctgtcatggctggctcactgaacctccagatcagcttttccatccatccaagctcatggaggactgcctatacttctttttttgcttcctttccactccttacacgtacttatgcacaccaaagagaataagcaaagattcagataagagcatccaactatgtggcactttgctgagtcccaggattcatagaagatggtgcatgtagctaaatagctttatacataaaacatagagagaggattttagtagaggtaaacatgggatatgaaagagggtcgtttacatcaatggaggtacactgggagaagtgtaaaaacaagagaccccatggcttagagcatcaatagcagagtggaagctcgtgaagagagcctcctgcaaaagttagtgaccttgttgctagtgaccctgggatggtacaaccataatgactttattgtcagtgaccttgggatggttgcattggtaaccactccctgaggcttcattgtcctgggcacttcatagctgtcagaccaacttttttgactcagatcaaaatgtacccagatactcattcatgagaagttctgatatgaagagaagactaaggtcccttgagttaggagaggccaggagggccgtagatgagatagttaaaatactaatattaggaggagtctaatgatgcgctggcaacactggttgggaaatgttgacgtgtggtgttgatgagaatactatagctaaaatttgacattaaagccaaggaactggggctgtaaattgaggctgtggtatagatttacctgccattctggtcccaattttaatctgtaaccagatgtcaatctggaagtccctctccttgggattcataacttgatatttgaaccccatgtaaagtgtgcaacactaacttctcttaggtttcatcatattagttttgactcattattctagaaatacctcatgacctcatgtttcctcccaacaatgagcctagagagaccacaagagctgtttttccccttgactttggagaagtacttagaaagtattacagaggacaaaaggctttgtcaatgagtccaagagatgtcctgagcccagtaagcagcggagggtgttgtcctgagaccctgagtcagggttcagtctcttcccagcagtacttttggaagatgtgaatggaagtgatggagccagagaaagccattgctcatcagctttgtacagtgtctaatgtgaggtaatgcagcagctggctgctgattagcaagggagttggagaaacaagagttgattacaggccttccaggcctggccagggtccaggcactctattaaagtgcctaaatatgtgggaattacaggtcaagtgacactggggacaagagccaaagatgagacaaattattcctgatgtatcctctttgccatctgtaagccctgcaagtcaatcacagtcttgaggcacatggggacagaatctcacttggcatgtgctgtcccatgggcggggactatcacagcatcatttgcattgtggtctttgctctaggcactgcccacctctcttgtgtcccatagaaaatcttttgccgggcagtggtggcacatgcctttaatcccagcacttgggaagcagaggcaggcggatctctgagttcaaggccagcctggtctacaaagtgagttccaggatagccagggctacacagggaaaccctgtcttgaaaaaaacaaaaatgagagaaagaaagaaagaaagaaagaaagaaagaaagaaagaaagaaagaaagaaagaaagaaagaaagaaagaaagaaagaaagaaagaaaagaaagaaaggaaggaaggaagaggaaggaaggaaggaaggaaggaaggaaggaaggaaggaaggaaggaaggaaggaagaaaaaaaagaaaaatcttttgaggtcctttttttctctgtttctctccagtgttctagtcacattttaaatcatgtcccactggttaactctattaacaagagcagttgtaactgtttgctcaccattcctgtgcccagcattactctggccatgaaattagtgagctccatattcacacattattatcctgagctcagccattagcgtctcttatctccatcccgtaactgcactaccaggctcatacttacacttcgataatgctgaggtcttatcttcactttgtgtccattgatcttgatgtctccttcgcccttcactttcccagttgcctggcctctcagatttaatgctgtcaacctttgtcccttcctgatccacccgataaccctgttatatccagcttttgcctaacttgccccaggtcagagtagctgcaacagaacaccctaatgtgttcactggtctcacacatcacaattctttcttcaagtctgcctttgggctgtttaagatcactctctagttcttaactagcagccagaaccccagaaactattaccttgtttttttactcttgtatcattaaaatcttcagttttctcagtgcccacaagccatctgtttgtggagctttgctagggagtgatataaaacctctggtctctgttttccattctcttagcacttgtctcttgtcctggctacattcctcctagtccccacagtcactgcaagaccagtggtctgtctatctcagtgtcttctccttcagtctcctcagatctcatacctgctgagccctcagcaagccttgccaaggaagtgtggatatgagttaaccagcaggcccaggctcttgttgtgatgaaggccagggttgtttgtttgtttgtttgttttcttttgtttttatcatttgggtaagttaaataagtatttagcaagggaaaagcacttggtgaggtacaggaaagcttgggccatgttccagaaaagaaaagaactgacccccgagagcagaaagagtccttgtgtaccttgaggattgtgcgaatgcaaggtgaagaagatggggtgagcatgcttggtggtgaatcttggttcctcacacttgtacagtcagacagagggttcaacccaacatctctgcttccagacagaaaggaaactgtaagcaggtttggactctctagagccatgtcctcatctgtaatgtggaaacagaaactgctcagttcctaaggtgactagggaataaataggccagcatatggaaaacattccaaacaaggttgggcagctcagtgtgatctacaacttcctgcagtattctctttgaatcttacaagtttcttgccctgttttacagaagaaaagatcaatgattgggtgggggagagggctccgtccctggaaacttaaaacaaacaatcaaaaaactggtcacagtctcatgcacttttaatctagtgctggggtagcagaggtaggtagatcttctggtcttactggctgacaagtctagcttactttgtgagagagacccatctcaaaacaaagcacaagcaaacatgaaggtagacgatactgaggaataacagccaagattgtccaacataaaagcatggacacacacacacacacacacacactcacaagagactgagggtcaaagaacttacagagatggtcacgattattcgggcagaaactgacagaggttggttgtgtactgagatcatcacaccttattgctgtttgcctgagaatccccaagtcccctccagataaaattactttatcctcattgtagagactcacatccttccctattccaaaatgccctggcttccccagcaggatggcaccaaatgtttaccatgctgccacttaaccagttccagcattgacaaatcttcagcccaaggagaggaaatagttgtgagattgcacactgtcacccggaagggcagaaatgttctcaaaattctcctggcccagattctctttttctgaaagagggcaagagactatgttctcaaagccaggactttgagtccagatgacaagattggaagtgcagttgacagagtccagatcattgcttcatggtgagaggggatgacattttattatgtgctcacgaatccttatccaagtgtggctgaaagtcctgtcatgaggggccaagaggaagatcgctgtgtgttctctccccaggctgaggagaaggtgcatgcttcctcagcaccagtaattagcatgaggggatccctcagcggagagtccagttttctggaaatgtctcccaactggccatcgtggagaagctgcaggtttttacaggaattattttggtgttctcaagcatttgcaaagctcatattgctgtgttgtagagcgcatccttgaggatgtgttgagaggactttgaaatgatagggaagctaccattatcatgccagcctgacaacagtaagctcaagactttgctgtgggagagcccttttcataagcttgctgttctttaaagtgggtgacttgcctctacatggggtcctttggcttacattttattagtctggagtccatgaactgagagttcagccctgatgatgctgtgtataagtgtaggaactaaagttatgccacaccaacaagaggcacccatgaactctctggctttaaggttgctgtggcttccttcacctgattgccctgactcagtttcttcctctgaagccttattttaccacctgaaatttcacttaattctacagatgttgatgtggtagaatactcattgtatttccaccacataagcatgcacatgcatgtacacacgttcacacagacaagtgcatgcacacacatacccatgcatgcctacacacacacacacatatgtgcacacacaggcacatgcatgtacacccatgcacataagcatatacacacacatgcatatgtacacacacgcacatgcatgcacacaaacacatttctgagtcccaccttgtggaactcacagtgaggcagtgaagtcaggacataccagaattctttgtatttccagagatttgctttctaacattctcagatccctggatcgggaacagcaaagtcaccattcaacttgttagaaaggcaagttttcatctgtctctccaaactcagagtctagcagctctagggatgcagctcactgctttgacctttaacaaatgctgtaggaaaccagggtgcatgcttagacttgagaaccactgagctagccttcaagggacacactgagcaggtctgagttcgtaagggtagactgctacaacttgatttcagctcagagctacaactcttgtggaacttcttaacaatatttgtgaagcattgtgatatttttcttgtgtcccaagcattgtggaaacaacccatttgttttgatgggaactaattcagattagcacacaattccacatggaacttccagaattttcttcaaattgttgatgctcattgggatgttgatgccatgagtaagactcacaataaaaatctcagtttgagcaaaagcctctgctaccaaatgtctctaggggatgagaattttcagtgatttagtcctttgtggggtctccttcctttgaaccattaaagttcttgtctatggtgaggtcaaccagatcccctgatctcctcagcaagtagacaccactggcccattatcccagaaattagctcagccttacttagaaggggcagacaggtgtggcttctggaggggaactgacctggcccatcctgacacactctagtcctgctctcgcccatcctcaagcttagtatgagagctaaggagaaaggagaaaaagaacttgggagaggaggtaggcagaagagagtctacatgcttgcttatgtgactattacctgtcggccccttgctcatagctgccctgagagctgggaattagtggtgtctctgtgtgttttctcttttcctgaattatgaaagattagtaaactcttcagcacctccactttctcacctatgcaatggtacaattttagcacttttctccgtagcttgttctgaaaatggacttaggtacctatgatgaattcactgtgaaaaggagattttagaacatcttgtgaatgtgggggcctctctcttgagaaattccccttatatgtacctaggtcccaggattggatttgctgttagatggggatacgttatatgtggcttcctgccaggctactggtactgggggcacccccttcttctctgactgttgggcttgtatgggtgccatggagaggtgtgtatgccagctctacatgacaagtcaccccttggcaagctggcctgggcaggatggcttcccagactttttccacttcccatcctaatgactggcttcactgcttaatcgttggctttctgtctcattcttgcagctgtggtggttgggatttagggcaaggacttgggatcttttttctaatccctttcaaatcctgcttgagttgcaaagtccagggaggacatagagaagaagggagggggaggatcactctgcctaaaggtagtgtattggtgtgctttcttctgagctaaggaaataggtgcagctaggtaattttattatgaaaggctggggctgggagatggctcaattggagaaaagcttgctgaaaatgcataagaagctgtttggactcccagcacccacatcaaagctgggcatagctgtacatgtctataaccctaccatgagcagcaagggagacaggtggatccctggagttggccggccagccagtctacacaactggctgagggaaagacctgcctcaaaaagatagagagtaatagtgaaggacctagacatccggcttccacgcccacccatacatacagaaacccaaatacacgcacatgcataaaatacatatagagtgggtgttttttacttgatattctgtatcaagctggaaggctgtatgtggtaatgactttttgctgttaggtaccccaggaggcacaaggcattgtgggataaggaagtgtaagtatagattgtgtctcttctggcctctgccactcttcttaaaaagtcaccagaactcagcaacagaggctctgttccattcagtcctgattcttagcaagtatccaacctctggatgccatagctacattaaacttccattctccccgaacttcacaataggaattggatctggctacacgaccctctgaggaatgttctcaaaccctatccaaacagtagcaggttgtcaccttcatcggtcaggaattccacagtggagtatattatctatctggaacccctgcaagactcaaactcagttgatttttttttctatgctgagtatttaactcggggcctcataaatgcccggcatgtgctctaccactgaactgcaggcatctgaaaactctgattcagttaattgcgatcgtgcaacttccctgcaagagatgttatgcaatatggtgctaagacatcatgccatctgtgacctgtgtacagatttctgagtctgacttgaaaagttttttatagttggcttcagaatattctcagctaactccacccagtagttcttagtattctatgtgttttagagccttttacttagttttccaccacatttatcctgtctaggactttgttcatgaaccactctccatatattctttcaaccaaacgatctgtattcacaaggcagcttgtgtctcatctctttgacctcagcctctgagtgcactctccctcattttttctctctccttccttccctcccttgtttcccctcccctccctcttagaaaaaaaaagacgtatttatttttactctatgtgtgttttgactgcatggatgtctgtgaatctcatgcatgcattggcccttggagaccagagagattgtcagattcccatagacctggaattacagacagttgctggccactatgtgagtactaggaattaaacctaggtcttatgcaagaacagccagtattcttcactgctcctgtcctgctgcagctttttaaaagtctgttgtgaaaacttggtttaacccttggtattcattttcttagctctgtcttccgagatagaatgcaagccatttgatattggaccctcttaagcatcttttcttcagtgccttgccaaacttacacaccatgccacaaataataaaatacatttgattctgataaaggttttgactgaaactgcattgactttatagatttatcttgcaaaaagaaacactgtgtgtagtctagggtcatgatcatctaatgtacacagacatgccgagaactttcctgaataagagtaaacctgaatttgggaggttctaaagatgttcctggttcttaggattttccacaagagacaattcaaattggatcctttcttcttaccattatttttgcccagcttgtcaaaaacttacacaaacctggggagagagaaacccaattgaaaagtcatctccatcagactggcctgtggacatgtctgtggggacatgattgtgagtgctgatgatgtagaaggacccaacccacttgtgttgctgggcagtatagcccaagctgtacaagaaaagtagccgagaaaggcaggagaagcaagccaataggtcgtgtttctctacagtctctgcgtgactttccctgatgttgaactataacctataagtcaataaaccctttcttctccattgaaagaaaaagtatcagctcaggaccctcaagaccaagttctcaagacaaaggagatttctttgccacagagggcagggataagagacaaagacaggagatagaggatgagggagaagggaagggaacaagggaaaggggagaaagaggtaagggagaaggggcaggggtatttgtcccagagtgagacaaaggactgcttctggatagagaagagacagatgtggcacttagcaagatggcacttttcccctaacaaagggaaaccttcatgttaggatgaggtattgaagtttaattgagcatgataattaggcagccaaagaaggcttttgattgttgggcttcagtactttggtaggtggaccttagtagtcaacctcaggaggaggatcaaataaaggaataaaccttgggagctagcattaggaatgtaatctaacagcttttagcaaggcagagggaatgaggaagaaggatgaagccttccagcaccgtgctggccatgctcgatggctacacttgccaaactcaccatgcttgccactctcctcattcatgagctagtcagagttggccctttacccatgttactttgggggcagtttttgttttggtttgttttgttttggtttggtttggtttggtttggtttggtttggtttttcaaatcagggtttctttgtgtagccttggctagacttggaactagctcagtagactaaactagccttgaactcacagagatctgcctgtctctgctggtattaaagtcatccatcaccaccacttgacctgggccagtattttattacagcaacagaagggcaaatctgaacacgccttcctctgatccttgtgacctctgctctttccccagagagttcctgtgagaataagcgggcagatctggtgttcatcattgacagctcccgaagtgtcaacacctatgactatgcaaaggtcaaggagttcattctggatatcctgcagttcttggacatcggtcctgatgttacccgagtaggtctgctccaatatggcagcacggtcaagaacgagttctccctgaagacctttaagaggaagtctgaggtggagagggctgtcaagagaatgaggcatctatccactggcaccatgacagggcttgccatccaatatgccctcaacattgccttctcagaagcagagggggccaggcccttgcgggaaaatgtgccacgcatcataatgattgtgactgatgggaggcctcaggactcggtggctgaggtagctgccaaggcccggaacacaggcatcctgatctttgccatcggtgtcggtcaggtggacctgaatacactaaaggccattgggagtgagccccacaaggaccatgtcttcctggtggccaatttcagccagattgagtccttgacctcagtgttccagaacaaactgtgcagtaagtctgtgcctcatttgtctttaaggccgccttcattctgtgctcaggtccatgggcaaagagagatgcaccattctttggaggattatacatatattaagcatataattacacaaatacaaaagtagccttaattgttaacagtgtaatggaagaagaattcaggacagaaaacctcagggtctaatctaggccatgttgtttataaagactttcctagggctggtgagatggctcagtgggtaagagcactgactgctcttccaaaggtcctgagttcaaatcccagcaaccacatggtggctcacaaccacctataatgaaatctgatgacctattctggtgcatctgaagtcagctacagtgcacttatatataataaataaacaaatctttttaaaaaagactttactagaggaaaaggtgtgtgtgtgtgcgcgcgcgcgtgtgtgtgtgtgtgtgtgtgtgtgtgtgtgtttgtgtgtgtgtgtgtgtgtgtaggtgcatgcatgccacagctgcttatgtatgaaagtctgaggactatttgcaggagttggttctctgtaccctatgggtcattggaatttaaacttagatcatcaggcttaatgacgggaccctttacttgatagctccaaagggctttgaaatgcaaagacagattgagtaaggacagaataaaggtatcctccaacatgtttagctgacacattggcattcccaaaattggaactcgcaagttggagtaggaataggagcagaaggtggaaatcataatagcttccccatgtgtgtggaagaccagggaatttttgctgcaggatgtttgtttactgacaaagaggctcaatacaaagcaaggactgtgagggctttgaaggctaattcttagaatatgacaaactgcaaaccttatgatatagtgagtgaaaaacaagatgtacttaaaaacattttaaaatttattataataattattattacttattcactttacatcctattcattgtttccctcctggttaccccctcccataaccctacccctattccttctccccttctcctctgagcacatgggggtcttcctggggatccctcccatcctggtatatcaaattcctataaggctaggcacatcctctcccactgaggccagacaaggtagcccagctagtagaacatatgccatgtaaaggcaacagcttttgggatagcccaggttccagttgtttgggactcacatgcggaccaagctgtatgtctgctacatatgtgcagggaggcctaggtccagcccatgtatgatcttgggttggtggttcagtctcagagagccccaagggaccaggttagttgaccctgttggtcttcctatggagttcttatctctttagaggccaaaaccgttcctcctgtttttccatgatagtacctaagcttcattcactgtttagctgcgggtgtctgtctctgtctaagtcagctgataggtggagcatctcagaggaagccccccctcaaaattaaaagtaatttaatttcttttcaagataaggcttctctgtatagccttggctgtcctggaactcacgctgtagaccagcctcaaactcacagagatctgcctgcctttgccccccaattgttgggattgaaggtgtgtgctaccactgaccagcttaatttcttaaattcttttgacacaaagtctcaataatccagattgttttcaaactctctgtagtggggaataaccttgaattttattattgttgttattattatgttccttctaactcccacatgccaggattacaggcgtgtaccaccgcaatgaggatgaagtctagagcctcatcactccggacaggcactctcctgactgggctacactcccagccccaagtgtacttttgatgtatcactaaaaaacaaaaggaaaaaaaaaacttgcaaaccttgcaaaaactaacttaagcaaagactccattttcttttgactccagagtcaaatgatttacttaagaaatcaatgacatgaaagaaaaacaacctttttttctgagcagggtcagttggaaaccattcagaggcaccatttccctagcatcacagagaggcttcgttattgtggtgcaccgtggcctaagtcaactggaaaacttcaatcagtagaacacactgcaaacattttaaaggtttatgactttaaatgacttcagcagaatttatgttccccctttcctggaaatattaaaaaaaagaaatcggttccgtaaccctcttgtcagcttcttcgtgtgtattggatggttttaatggaggagtgccttttataagcactctgcagtcatcagcaaatggaaagataatatgataaggcagaagagctctatgacatgaatgacccccatgtgacttgggctcagagaaccttttttctctgtgtgctttagacacgcagcaaatttaaaaggctgtttggacaccccccaccccaggctccccatcatctttgtttaatctggaagctttaagaaaacactggtattatctcattcctttgtgcagcctgagaatcccctgggactcttttcatgcactctgctgaagtgcagctgagctcccggccttgcaccaccaggctctgctgagcagcttcatcagctctcttgaaaggttgaggaggccctagagcctctttatcaaccacatgctgaatacggcaatactaatgcccattaagcactttccccgtacacctgatgcttgtgaaaccaggctacatggtactgtaccagtatgtctgtgtgagggtgtcaaatcccctgggactggaattacagacagttgtgagatgccacatggatgctggggtttgaaccctgatcctttggaagagcagtcagtgttcttaaccactgagccatctctccaaccctggccttacaggttaacaaactttgctgattccaaagttcctgttctccttcacaggccaagaattataaattcctgtcttaaggtgaactatttgctaagggcagcctgcacagggaaatggctctgctagtgccattcatctgaagaaggtaaacctggtaagtgacccctgtgttgtagaactaggacaggactggctgtgtggtgctgggtgagagactggcagtgtgaccgactatgtgacaggatgagcttggtccttgtaaggtagggcttttataagctggtggatgtacagacaggtttaaataacctgtgggccccattcagtgtgtgtgcattactacagtcagatactctccggatgcacatgtgaggcaactggctttacttctcatctgcagtctgacaaccagacacagccatgagcatcttctgaactgcaaatgacatcttcaggagcaagtttcatttgctcctgaaacattgaactgcaccctgatggccataggcggtcatgtctcatgttaggtacattctgtgcattgttccatttaatactaaagctgtattcccagacaggtattcttgtggtgcccaagtacaaaagtagaaactgaggcttggagaaaaataaatagttcaaacaccagcttccgagattcagagcctaagtacttcctctccacgcatgagcctcaggactgttggaaagatgttctccttatagaagaatgggtgtggacatggtgtgtccttcatagcccaggatagctttccagacgaggacctcatcccaaagagcacctgggtctgcctgggggctccaagaaagcctttaaagtgaaacaataagattaatcactaacagttgctgttatcaatatatccatgtggctaagactgacagaacactcccgtaatctatacacttgaggttgaggggccaaggagatgtctcagagggtaaagacattgacatagaagcctgataccctgagatccatccccataactcacagaaaaagctggaggcagtggtgagatgaaaagccaagactggagaactgacaagaagttccagcaccagatagcctgaagtacacacagcacagcagtgataagctggtcagggaggatccactcctaaatgctactgtgacctccaaaggacacgttggtgtgtgtgtgtgtgtgtgtgtgtgtgtgtgtgtgtgtgatgagagagagagagagagagagagagagagagacagagacagagacagagacagagagacagacagagacagacagagacagagacagacagagagaaagacaaagagagtgagcatgagtgagcactcatacacagaggcaaaataaaaagacaaatgtttttaaagaggctgaagtaggaggatctagagtttcaagttagcctagtctatataggaagaccctggccaacctgagctacaaaagagaaacctatctcaaaggtgtgcatatgtgtgcctgagtgtgtgtgcatgctccatggggctctcagcagaagtaaaatcattttattaacacaacaaacatgagaaataagtattcttaaaactcaggaaaaaatgaaagacttaaagacttctctgccttgcccagggtcagtcagctctaggtgagtgaagggtagccaggtgttctggccccaaagctacagctaaaccacaatnnnnnnnnnnnnnnnnnnnnnnnnnnnnnnnnnnnnnnnnnnnnnnnnnnnnnnnnnnnnnnnnnnnnnnnnnnnnnnnnnnnnnnnnnnnnnnnnnnnnnnnnnnnnnnnnnnnnnnnnnnnnnnnnnnnnnnnnnnnnnnnnnnnnnnnnnnnnnnnnnnnnnnnnnnnnnnnnnnnnnnnnnnnnnnnnnnnnnnnnnnnnnnnnnnnnnnnnnnnnnnnnnnnnnnnnnnnnnnnnnnnnnnnnnnnnnnnnnnnnnnnnnnnnnnnnnnnnnnnnnnnnnnnnnnnnnnnnnnnnnnnnnnnnnnnnnnnnnnnnnnnnnnnnnnnnnnnnnnnnnnnnnnnnnnnnnnnnnnnnnnnnnnnnnnnnnnnnnnnnnnnnnnnnnnnnnnnnnnnnnnnnnnnnnnnnnnnnnnnnnnnnnnnnnnnnnnnnnnnnnnnnnnnnnnnnnnnnnnnnntcattttattaacacaacaaacatgagaaataagtattcttaaaactcaggaaaaaaatgaaagacttaaagacttctctgccttgcccagggtcagtcagctctaggtgagtgaagggtagccaggtgttctggccccaaagctacagctaaaccacaatgtgctcagatgggaagaggagtagtgttctctggtcagggctgtgtaaggagggtgatcaccatgctccgagctcagaatgatgatatttaaagtctgttttatctcgatctctgtctgtctgtctgtctgtcatctgtttatcatctatctatctgtctgtctgtctgtctgtctgtctgtctgtctatctatctatctatctatccatctatccttctacatgccagtcctggtcctttcactggtttcactccccaattagggcagtgaatcacagtttgaaagtgatgttgaaacccaacaaaagaccagactcctgtgaaccaaggtcctgtgtgcaagctgaccaaaccccacacatcctggcatccatttttgttgcccaggagcagaaaacactgactctcaaggttgaaaactgcaagtcttaaggttaaataaaagtctgtgttttgaaatctggtgactcagcatagcttggctagggctgtgtttgcttaactctatcgtgtctgttttatcagcccagagcaaagctgttcctaccctaacagcccctttatacttaggcacagcttaaggcccaaatcgtgttctgaaggcactcctcgcgtctgggaaaagtctacattgatttcacccctttgaggctctattgtgaaacagggaggcaaacctacatagatgttggcttatatattctgcgattgttcccatcgagaccctcagccagccacacagaacagaatgttcatcttatcattcatacatttttaaaaaaaaaacagatttctcaagcaaacttgagtgtggtggtgcatacctacagtcccagcatgcagggggctgaggcagaaggatgataaattttaggccagtccaggctacataggaaaactcttttacaaatcaaaacaagcgaccccacttcaaaaaaatagctacttattctttcctttcctccccacctcccttctctctctatctctgtgtctctgtctctgtgtctctctgtctctctgtctctctctctctctctctgggctctctgggctctctctgtctctctctctctctctctctcaaatatatacgtatttgagataggacctcattacataggcctggcttgtaagtcacagatctgcctgcctctaacttctaaatgctgagattgggcatgcacacacacacacacacacacacacacacacacacacacacacacacacattcttctcttaggccagtctaggttaaatgagtcattttcttaaaaaaaaaatttcaaccaggatggggccaatgagagggatataaagtgaatgagtaatatatgagtaattctaaacaccacaacatttaataataaatttattaaattaaaaaaatccagtcccaggggctagagagatggctcagcggttaagagcactgactgctcttctaaaggtcttgagttcaaatcccagcaaccacatggtagctcacaaccatccataatgaaatctgatgcccttttctggagtgtctaaagacagctacagtgtacttacatataataaataaataaatcttttttaaaaaatccagtcccaatactgacttagactagtgacttattatttcttctgagtaaaaaaccttgctcgagcttaaacctggtactttctgaggaatggagctaattggctcacacagttcttcagctcagtgaaggaggcagaatgctgcttccactttaacagcacagcaaaggtgagcaggcaagagacccagatgtacgcaggggcactcagccataggactccatagatgtacagtttattctgttctgtaaaatatttgaggttcttttggttgaaagtgatggaaactcaacttgacttgggtgttgtggctaattacactggagccaatcttggaggaataactgtatgccttctggaaaaatgcatttgagcatgctcattgcatctgtgtaaagatgaaagactggaaactgtccccatgctgaccaacaggtaaatgtctaagtaggttgagacaaatggatgaagacatcagtaggcttcagccagagccaggtaattaaattcaatcaaaaaggttagttaagttagagtttacatgtgagattaaatccaagatagaattgttttacattgttcaatgtcattttgctccatgaagtcactgtaaacactgaattaaagcacatggaatcatttcctttatacaaaatacacaggcaagatcagttgcaatgagcctctggtaatctgacactttcgtagcgggtcaatatataatctattcagagacaacaaaattaatatgtattgctgactcactaaccttgagctcatggccatcaaagaccctaaatcattctaggatggaacatgtcttaatatattcattttcctaagagggctttatcatagctttttttttttttttttacttagtgggtcatttcaaacaggaaaattacctacaaaacccgcaaaaatgtcaaaaacatagtgctgcctggactatgaaagcaacaatttgctatcatatgaagtagaagattaaaggaagcaatgctgccttgctcaacacatccaagggcatcgagaccaggagacaaactactgttacctcttagtacctcaggaagactgggaaagcgccgtatggctctggggttacaagtacagctcagtgaccaggagagtctacaaatatggaatctatcagtaatgaggatcaagcttatatggcctctcattttaatatctttgaaattagagcacattttggatcctgtaaaatacagtgcttgtgtcagtacagatagaatttgtgattaatgttgaatgaaaattgaactggatggttagacagacagacatatcaatgattgggtatacaaagagacaatattcccaaatgtaaaataaatgatattataatggagagatggctcagcagttagaaaactggttgctcttccagaggaacttggttcacttcccagcactctgtgctcaatcattgtaactccagttctagaggactggatgccctcgtctggccttctcaggcaccaggcatgcatgtggtgcacagatatacatgtagtcaaaacacatagaataaaaataaataaataaaaatcaaacagcatgatactttccttttgctgtgaaatggttaataggtattaagccctccccagctcttgatcaccattccggcctctttatcaggttaactcagttaactctcacaaggccctgatgaggttagtgtaatgtttagcttcacttaacgcaaagatattaaaatttctcaggatcacaaaaaggtcaactacttcagcctgtagtataaatggtaaggttaaacctgcaacttcccttatgtgatctgtgtcctaacaggagttatgagctcagaacaataagttctaaattgtgctgttataaaataaaacagtttcattcccctatctcatatattgctgtcttagagtttctattgttgtgataaaacaccatgaccaaaagcagcctacacctctcaggtcaagaatcatcactgaggggtgtcaaggctggaacctggaggcaggaaggaagcaggggccatgaagcaatgatgcttactggcttgttcctcgtcttgtctcctttcctttcctttcctttcctttcctttccnnnnnnnnnnnnnnnnnnnncatctatccttctacatgccagtcctggtcctttcactggtttcactccccaattagggcagtgaatcacagtttgaaagtgatgttgaaacccaacaaaagaccagactcctgtgaaccaaggtcctgtgtgcaagctgaccaaaccccacacatcctggcatccatttttgttgcccaggagcagaaaacactgactatcaaggttgaaaactgcaagtcttaaggttaaataaaagtctgtgttttgaaatctggtgactcagcatagcttggctagggctgtgtttgcttaactctatcgtgtctgttttatcagcccagagcaaagctgttcctaccctaacagcccctttatacttaggcacagcttaaggcccaaatcgtgttctgaaggcactcctcgcgtctgggcaaagtctacattgatttcacccctttgaggctctattgtgaaacagggaggcaaacctacatagatgttggcttatatattctgcgattgttcccatcgagaccctcagccagccacacagaacagaatgttcatcttatcattcatacatttttaaaaaaaaaacagatttctcaagcaaacttgagtgtggtggtgcatacctacagtcccagcatgcagggggctgaggcagaaggatgataaattttaggccagtccaggctacataggaaaactcttttacaaatcaaaacaagcgaccccacttcaaaaaaatagctacttattctttcctttcctccccacctcccttctctctctatctctgtgtctctgtctctgtgtctctctgtctctctgtctctctgtctctctctctgtctctctgtctctctctgtctctctctctctctctctcaaatatatacgtatttgagataggacctcattacataggcctggcttgtaagtcacagatctgcctgcctctaacttctaaatgctgagattgggcatgcacacacacacacacacacacacacacacacacacacacacacacacacattcttctcttaggccagtctaggttaaatgagtcattttcttaaaaaaaaaatttcaaccaggatggggccaatgagagggatataaagtgaatgagtaatatatgagtaattctaaacaccacaacatttaataataaatttattaaattaaaaaaatnnnnnnnnnnnnnnnnnnnnactctaacttgtgttagagtcattggctgcaacattccttacttaaatgcagagacgtgtatatgcaaaagtagtccatcagtagctgagtttccctacctactggctaaacacaggattgctcttacatttctcttttattgtataagcttcagaaagctattttctcacttggacatcttttatttatgagaacacttatataatgtgttctgttcacactgatgcctgttaattttaaatatgctcaacttgtactagattgattaaagtcataaattgagatgttaaaaaacagcaagaattgcaagagctccaaatagatttaataagaacctatgtggccgggcggtggtggcacatgcctttaatcccagcacttgggaggcagaggcaggcagatttctgagttcgaggccagcctggtctacaaagtgagttccaggacagccagggctacacagagaaaccctgtctcgaaaaaaagaagaagaagaagaagaagaagaagaagaagaagaagaagaagaagaagaagaagaagaagaagaagaagaagaagaagaagaagaagaagaagaacctatgtatctgaagctgagatgctttcagaaactaaatgcagcaatatttaaaattgagatacaaaaatcatgacattataaaacatttgaatacagtgttattccaaatttttgtatacttcatgcagacttgaaagtacgtagttcttagaatttatgatcatgggaggctgttggcttctaacaccttcatttgacgggtagctctccttccaactccacttctgcctactcaacgcttcttcttactaaagacattctggaatcagaaacttctctgatcttctctgcctgtcaaaaggtgttaagatgaacctggaatttgtggatttgtaggccaaaaaccatacagaataagcaatgtcatatagttcaccctaacatcattcctctttcaccttacgtggtcctttatttatctgactgtcaactttagacagagaacctccctgctgaaagggacgtcagattctatcgctttgggttcaagcctcttcttcacatgctcgcaatgcatatttgctgcacagactgaggctaagggaaggtgccactgctcacccaccttctttgtcttcctttgcagcagtccacatgtgcagcgtcttggaacacaactgtgcccacttctgcctcaacacacctggctcgtacatctgcaagtgcaagcaagggtacattctcagcacggatcagaagacttgcagaagtaaggccactttgctgatgtgtcagtgttgcttgctctttagctaggtgtgtctttttttttttaatgcatgcccatgtgttataattttattcagccataaggaacataatcatgtcatttgaagaaaatgaatagaactgaaaagcatcatgtcaaacaaaataagaaaataagacatagtatactacatgctttctctcataagcagaatatatatatatatatatatatatatatatatatgtgtttatgtttctgacattccaaacattatcaaacattatcttttcacatgacaagaagatatctgcaaaatagcagtaagttaaaccaacttgacaactgtgcaaaatttttttagctaggtgtgtcttattcacccatagtccctctcccaacctacctgccacctcctcagagctggaaacagcttttgtatttcccggtattaccccctcacccaccacagtgcctaagcctggctcatagtaggtcactaggcaatgtgtgaaaggttggtggagatgctgtctctgagaagcagtccctctcacatctactgcctcttggtggaagctttcccaccctgactttattagctgggccctatggagccatttctctcttttatcttcttcccaaagcatggactaaggatgagatattgacctcagtagtcaagcattgtgcacgccccatcctagagatacgcagggatccggctgctttagtgatagacattttatggttctcctaatttaaaaagaaaacaaaaaggacaaacagatataaagcattagaattattagaacttatggtgttcttctctggcccagttcccaaaactagacaacacactgatatttaagccagcaggaggtaccctggcctttcgggaattaaccatatagtaagtgtatgcccatcctcttcttcctcctccttgtcctcctccttctccttctctgtaagttgtaactataaccactattttaaccacatacaacccaactgagcacacaaggcctgggaagactggctgcaaggaagcgaagagaactcagctaagtctgacgtgtagttcatgcaatgcaaaattgttacaataccacacggagagcaattaaacgctaatggaaagcagtttgcacaaatgtctgtaattagcactgcatttagaaagccaaaccacagtttccacttctcgtctcacttcttgttttcagcactgagcagttaatggaaggacctccctgtcccactgtcaacttgattctctgttctggggctcctctgtgaccccaggactcctggaacctttgacactccctcaggttccccagcagaagtcagtcacagcaaatattcacaggtttaacagaattcgctgacaagccagggagtctggaagggtcatctagaatagtctcacacatctcttgttcaccttgtcctcttcaggtgtgttcagccatcatgcccaccccttttctgctttctcctctttgaggagcataaaatattctctgtgtctcatgcccggtgattggctggggcctgggaagctgccagtgcctattttctatgggctggcttagccatgccagatgaattctgacaccaataaataaataaattaattaactaattaaactaaagagcttttcttccttcaatttcacaagcagtctttgtcagtcctgcccagcccagcataggcctggtattcccagactcctctcatcctgagggaagtgcctaggcttagggaaaaaaggaaggacccaagcagagctctgcctagcactgtggcatcaaagagctcaaagcagaggctacctgggctttgaacaggcaactaggtgcaggatagggaagtccactaaaggaaggacagaagcctagagtaaaggctcttaaattcaagagtgacaaatggatcagagagcaactcccagagtcctcggagactccaactctacaatccagtgtctccctttgtttgtcctttttcacaaaaagatgttgattttactttatgtgtatgcatgttttacctgaatgaacgtctgttcacagcatgtaccacatacctgtggaggccagaaaggatgtcagatcttctggaactgaatttatagatggttatgtgctgccacgttggttctaagacccaaacttgggtcctctgcaagaacaaccgtgctcttaatgctgagccatcattccagcttcctcttcctacttctctcttcctcttactactcctcctcttactcttcctcctcctcttactcctccccctcttactcnnnnnnnnnnnnnnnnnnnnnnnnnnnnnnnnnnnntcccattccttcacctccccaaaacatactgttatttataattacaggtgtcatagaagccaaaggtattattttcactgtgatctagagtggttgcgagccaccttatatgggtgctgtgaattgaactcaggtctttgacaagagcaatacatgttcttagtctctaaattatctctccagccctcctcctttttttgacacttagtttcactaagtgagtgaaactagaagcctctgtcctcttgagtttgggggtttcaggtttagtttcagagagcttctgcccgattgtttctgccctttgaggtcctataaccttgggcagtaagggtttggggaagtgtctagccaacactaagttaggggaagttaggggagacacacttggaaaaatgtggctgctgagccttgtcttctgcccaggcctagttatcctgagccattaccagaaccttcagcaccagaggtaaaggtgcacacttccttctcagaagcaaatcatactgtctcaactgaatttctgaaatggggtttgtgagactaacagggccattgtcgtccataggtttcaatttggaccctgacattatcatcttcaggttgtggctgcctcagccagacctgcttacttaaactctttgaccctcagtttcctcactcactaaatgggaacaatgatcacaacactgggaacttacaccgctgtttgaactacgacaatccatgtgctgagcccttggtgacaatggctgtgtgaaggctaagctgaaccagccagacctctgtctacatgctgcctccctgctgacactagtacaagactcctgggtgaaatgagacacagctacgcaccatttgattaacatcccactgactgttaatcctccatgccgttggctgtacacaaaatgtgggaaggtccctgagccactgccttgccacacagacacacattacagattaaagtatactttccttgctgctttctatgtatactctgcttttgtggagagaggggacagtcataggtgattcatagattcgcagagtgtcatggacatccatctcaaagtactagctccctttcccatgcaaatggagaactttctatctcctgtggtgtccaggtgagaaatggatctagagaagccaattatgtactgcaaagcacctggatcctagacaccctgtgttatcatgtgagctgaaatcttattctggcatttctacttttgatcctatttgtaccctctgaagccttactctagatacatgaataacctttcaggtatggaaaactattcatacctgatccaccctgggccactaatgtctctttttcagaggatatataacctcattttaggtgacctggtttggggcattttgagcgtctaagtaacatcagcttagtgaacaccaattattgcaaagtcccctcccattcaaaactagatcaaatgcattagagctcactttctgagttccactcatggaatggtctatattgctgattctttatgcctttcaaagggctttccctacccagcattatcatatgagacattgactgtaaaagtacttttatttgcctgaagtaattgttgtcttgaaggcttactgctgagtaagctcaccctttctactgctttctgaactctggctggtagttctactcagctgttgtagctcaaacatctctgtaagctgactgactcaatctgacttctctttgcttctcgctgaattgctctgcttggactcaaactaactctggcaatctgttctaatcttttggcttctttttattctctggctttatctttcccaactccactacactgcactcactgcactgactctcagctgactgactctctgtactgctcttgagtagcctcccttttctgcctgttctcatgagagctgggcatttcctatctctgacttattctgtcaaatctttctctgattcatcatattgtctgcccttcaattagatgtcactttcaaacaaggatgtttcctcttactaattaacctcacctacattgtttgggattaaaggtctacactaaggacatgtctgtattccaggtagaaggatcaaaagtatgtggtgtatctgtattctgtatggatcatatagacctagaatgtctctggatgtgatcagagctggattaaaatttgtctgcaatttatagatgtgttagaatagtgctagagtggtgaacacttaaaaagatatgtatggaaaagcctcatgtgttcctacacacccacatctgctctccatctctgtttgaattacttttccactagtaagacctctttcttcctcacccccatctcaggtttttggaaacaaggtctttctatgtagtattccctggctaccctggaactcactctgtagcccaggctggcctcaaacatgggtcaatctccccactctctgcttcccaagggctgggattacaggtatgtatcatcatacccaacttaatttttttaattttannnnnnnnnnnnnnnnnnnntgctaggaaaacaagaaggcatttggttagagcccagtcttcgtttattcctttgtctttgtttaataagattaatctcttaacagtctcccttgggtcagtacaaatcactcatggtcataaattacgacattctaaaaacagtatgaaagaacagcctcagagagccagctggcaagctcagtattcatggggcaattctctgggactgggagctttccagtccacactgcattctcatgtgtgtctggggagagaaaactgagccttggggttccaggtcacaaaagaagtctgaatactgtccactcagaggatcatggggattttttctttttcaaggggtttggtgattttctgactaccacactctggggattttgaggatatttagcaaacactgctgctgaaattcttcccctgagccagtgtagtttaacagaacgggtgtatcttggcacaactgtaagtaagtgaatttcatggttagtgtggtggaatggggaatggaaaggggagctctgccctgccctgccctgccctgccctgtccttctcctttcctttcctcttccttcctttctttttctttcctttttccccttctctttttttccccctctccttttctcgatgccaatagaatctctcattgggtcctggagcttaccagtcaagctaggctggctcatctatctctgtctccccagtgctggggttacaagcacctgtgtctgactttttatattgccttgggattgaactcaggtcctcatgcttgcctgacaggcactttgctatctgagcatcttccagttcttacatcagtgttttttgaaaggactccagaatgtctaatagacagggccacacagttattccttgcactttgcagagtcctggcctgtctagaaaataatcagcatttcctcatttgctctgtctgttctaagtcgtctggtacaaaaataaaaccacacagtatctcaagcaccttgttcatttgttttgaaatgatacttttaagacagtacacgaaccgggcagtggtggcgcacgcctttaatnnnnnnnnnnnnnnnnnnnncctttgtctcccaagtgctgggattaaaggcgtgctccaccactgctctgctgggtttttttgtttgtttgtttggttggtttttgggtttttttttgtttgtgtgtgtgtgactttaatattttcaactgttgatagtcaacaaacagaacagttattttaagatatacttcgttggtatgtctcccttttcatttttgattttgttattttggatactgtctttgggccctctggtaaatttggctaagggtttatctatcttgttgattttctctaagaaccagctcctgcttttgttgactctttctatagttctttttgtttctatttggtttgattttttgctgtctactcctcttgggtgtatttgcttcttcttgttctagagcttttaggtgtgctgtcaagctgctattgtaagctctcttcagttatttttggaggcacttagagctacgagttttcctcctaccactgctttctttgtgtttcataagttttgatgtgatgtgtcttcattttcattaaattttaaaaagcctttaatttctttccttatttctttcttgatgaagttgttattgagtaaagcattgttcagcttccatgtttatgtgtgctttctgttgtttttgttggtatttaacaccagtcttagtctgtggtgatctaatagggtgtatgggatgatttcaatcttcttttatctgttgagacctgctttgtgaccaattatatggtccatttggagaaggtaccatgtggtgctgaaaaagaggtatattcttttgctttatgatgaaatgttctataaatacctgttcaatccatttggttcgtaacttctgttagtttcactgtgtctctgtttagtttctgttttcatgatctgttcattgctgtgagtggggtgttgaagtctcccactattattgtcctatgtatgatgtgtgctttaagctttagtaaagtttcttttctgaatgtgggtgcccttgcatttggagcatagatgttcagaattgagagttcatcttggtaaattttacctttgatgagtatgaagtgcccttccttatcttttttgataacttttggttgaaagttgattttattcgatagtagaatggctactccagcttgtttcttgagaacatttccttggaaaattgttttccaaccttttactctgaggtagtgtctgtctttgccactgaggtgcatttcctgtatgcagcaaaatgctgggtcctgtttacatatccagtctgttagtctaagtcattttattggggagttgagtccattgatgttaaaagatgttaaggaaaagtgatcgttacttcctgttatttttgttgttagaggtggaattttgtttgtgtagctatcttcttttgagtttgttgaaagattgctttttgcttttttccagggtgtagtttccctccttgtgttggtgttttccatctattatccttttaagggctggatttgtggaaagatattgtgtaaatttggttttgtcaagggatatcttgttttctctgcctatggtaactgagagtttttctggatataatagcatgggctggcatttgtgttctcgtagggtccgtatgacatctgcccaggatcttctagctttcttagtctatagagagaagtctggtgtaattctgataggtctgcctttatatgttgcttgacctttttcccttactgctttgtttagtgcattagttagactggctgtccagtgagtctccaggattacagatctctacctccagccctggaatttcaggtacttctccaatgcttggctttgtatctggattctgggcatctgaactgaggtctcagtcttctgcagcaaacagatatccactgagccatctctcccagcccaggatgcaaaaattctcaacaacattttagcaagtagaacccaaccatactatatataaaaacagaaaaatatgaagagaaatcatggtttatcccattaatgcaaggttggtttaacattcatatgtaattaggtttaacattcatatgtaattaatgtaattcattgtattggtacactagtaaagaaaaataaatgaacttggtagatgcagagaaagcattaatctataaaaattcattccttaaaaaaaaaaaaaactatcagcaagtaagaataaagggaaaatggcttgatccaataaacagcagctctgagaaaaatcagcattgacattacactcctggataagaaactacattctcctctaagaggaggaatagaggaatataaagaagacacccacttctatcaacatggcattgaggacctaattggtataataaagaaagaaaaagaatttagaagccacaaggattagaaaggaaacaacagtgccacctttgtcaggttctgtgattccctatatagaaacactaattgagttttccttcttaaagctactaaactaattaaggagttgagtaagatcacaagatgaaaaagtctactgaattactttattgtatttctgtacactggcacctaaaattggtatcttaaaatactatgtaaaatagaataaaatataagttctggacaagtatttaaaataaacattctcatttgtttgttcttagagacagggttggtttgtgtagaccttactgtcctggaactagctctgtagactacggctggccttgaactcagagagatccctctgcctctgcctccagagtgctaggataaaggtgtatgccacaactaccctgacagtgttatttttcactaaaaactataaaagttttctgagataaattaaagaatatggaagaatatatttatcatgggttagaacattcagtatggctaaattgttaattcgctccaagattatctataaattcaaagtgattcccatcagaaccctccttaagttcttttagaaatcatgtgatttcaaagtattaacaaaaaatgtgtaacnnnnnnnnnnnnnnnnnnnntgtaaaatagaataaaatataagttctggacaagtatttaaaataaacattctcatttgtttgttcttagagacagggttggtttgtgtagaccttactgtcctggaactagctctgtagactacggctggccttgaactcagagagatccctctgcctctgcctccagagtgctaggataaaggtgtatgccacaactaccctgacagtgttatttttcactaaaaactataaaagttttctgagataaattaaagaatatggaagaatatatttatcatgggttagaacattcagtatggctaaattgttaattcgctccaagattatctataaattcaaagtgattcccatcagaaccctccttaagttcttttagaaatcatgtgatttcaaagtattaacaaaaatgtgtaacctaagagttgaaacagtcccttctcagtttttctggcagtgttagttctatgaagtccccatgacactgcattagcaaatattgaatctttgtctaggagaaaggtagggtcaccatactgtgatctccggaccaacattcatcagtaaatttgtaacctcatttttcccatgttgctatttaaataacccttattgtatgtatgtatgtatgtatgtatgtatgtatctctagatagagatagacatagacatagacatagagatagacatagacatagacaaagacaaagacaaagacaaagacaaagacaaagacaaagacaaagacaaagacaaagacaaagacaaagacaaagacaaagacaaagacatagacatagacatagacatagacatagacatagacatagacatagacatatctgacactagatttatagctagtcatgtaattaaccatgcctgatgagagttatctaacatttattttctccatgtacactgtatagccttcttgcactaaggaccactagagagtgcttcaatactaccttggagaaccatttaaacagcaaagtcaccaagaaaatacacaaaaatgtggcactaggtaggctgaaaacaagttgtgcgtttacatgctgaaagtagaaggcagaggagagcagcaactgcctcagctgggagcacatatgttggggacttggtatttgtcctgttccagtgtctgtggatggcagaaaatgacaaagtatggaatttgagtgtaagtaaaatgtttagcaagtaggcaaatttaaaatatgtgatctgagaataaagtgtatttgattaaaactttgaaaaagataaatggaattgtaggtttgaagctacttgcctttaagctatttacagagcagaatataatcaagacaatatatatggatatgtgtataatatcttgccattatcacaaattatgtagataacaattcaaagtgcgtttcaagacataagaataaatgctactaaatatcccagatgaatctatgccacagaccgggctcagtcggcccccctcaatccatgggaatcagggcctcagacagatgggcataaagtcggagaaaatggggtgacaaacagacaggacacaagggagtgtgctgtatctgaatgtaatttgtcaaattgagcatcaaactttttatacagaagaatatagggaagttaggtgacacatcagcaaggtacaaatgaggttactgaatgcttaatgactcttacacaaaacagaggaaaacaaacacaaagcctggcaggaactgggcagtaaaacaactgagacaaagtcagatctatctaaggtcagctatagtcttagaatccagatgtgaggtctttacactcccagggcaagggctttcatgcccaagtcatggtcctaattaaggagttccgctctagctaaccttctcatgaataatgcaatactctaaaaccacagcccaatctacttcctaaaccattgtaaattcctgtatataggagcgacttggcttttattctaagtgatagtgtgtgtgtgggggggggactttctactaataagtaatgtagtctgccgtacataactataataaggactctaaacttactttgctaaacttgctctgagatttctaactctatgtagtagatagtaatgcctgatttctttcacaatctctcttacaatactagaggcaattctgaatgtcactgaataggcaacattcttactgaattccaagcccagggttggctcaaggactacctagggcattggtgaaagccaggaagcaaagttcggttttgcttgggtatttggcaagacattgcttagaggcacctataacaaaacaatactggaaggaagcacacagatccattcacaaggataaaattggagcatacatgctgtggaatgccacagttccaagagactaagtttccgtgaaactcttcgcctcagggctccatccagacttttggcctgtcatgcgtgtcactactggagtggatgtagcaaatctataggaaaatattgccatatttggcaaaaaattcttaagacttaaaagaaaaaaaatcagtaaattttatcaaaattcattgatctctgaattatattaccactaaaaagaaaagacaaactaaactatgataaaacatttgcaaaacataaccaacaaaggatttcaaaatatataaagaagacaaaacaaccctttaaaaatagaaaaagaaaattgaatagacactaaaccaaagacagcatagagctgaggtgtagttcagtgtttgcagaatgcttgtacagtgtgtgtaagactgtgggttcaatcccaggactgaaaatcagtccaaaaatggcatatagataacaaagaagctcatgaaaaaatgctcataactagccagtaggaaaatgcgaactcaaaccacactgggtaccactacatactaactggactagatatatttttaaaagattttccttttctttttctgtatgtttgcgtgtgcacatgtgcatgtgtaccatttgtgtatgcatactcttgtataccagaaaagggtcctggatcccctaaaactggagttacagacagttgtacaccacccagcatgggtatgggagctgaatctgtcattctgattcaaaccaccacacactgcttataagaatgtgaaatgttttaccattttagaaattattttagcattttttataagcttggatgtgtacctaatatgtttacctaccattcacttggatacttacccaaagaagtgagttgtgtctaaagatctgagcacaaatgttcccatgcacttttattgcaataatcctactctggcagccatacatgctcctcatctggtgaatggataacgccctgcactcaagcacacactgcaatactacacagcaataaggaatgaactccacaggcagcagccagcgtgcctcagtataaaccttctgcatgaaaggaactagatgctaaaataggatacttgctgtaaattaaacaaagtattcctatcctatcccatctagcttcacatgaaggagactcagactatgattgattgattgattgattgattgattgactgatgtagcttttgctcaattactgggggttaccccctaatctaagtttctaatggataaactggctacttcctgactctgctccccaaatacttgctgtttgtgtttcttctgggctatttctgctccagcagtcggttgcagaggagagagcagagagtgagggcatttcactcagctttgtgctccccgctccatcacacctaatgaagaccttctgtgctctccttccctcctcttgtctcctacctgcaaccctcagccaggtaaatggaactccacctacttctaatctccccagccaattctatttacccaatagctgtaaattggggggcaaagtttacattgcatcacttggtgagtgaggagctgttcatgaggagagggtgcaactagatcttggggccagtgtttagcatttgaatgcatagcaacaccagaccaacccccagcaacttgctgtgtcatgctgacagagggcagatcagtggttaccctgcgaccaagaagaggggcagggggaggagttataggatgaacaaggatggtcacatttggtaccttgactttgttgataatgtgtagatatccccagtttatcaatttatacatttttaaaagatttatttattattatatataagtacactgtagctatcttcagatgcgccagaagagggcatcaggtctcattacggatggttgtgagccaccatgtggttgctgggatttgaactcaggaccttcagaagagcagtcattgcttttacccgttgagccatctcaccagccccaatttattttttactgaaatgcgttttttcctatgtagtccgacctggtctcatactcagttcttcagcctcagcctccccagcagcaggctgcactgccatggttgcttgactttccatttaatgcagtttgtttctgtcatttacaagtcaataaaaccagaatccgtaaatcagaatgagagctctgaaggtaagcagtgctccaagtgctacaagcaaaagagattatagaaagagtcttggaactggaccaggacacatgtgaaagcagttggaaactccagctgggtctttggacatgcgtgtcaagggcaaagttgcaattagtcttgtattttaaagtcaccgttggatctgacattagtgtttatgctgtactagaaggcaactaatgattcaaagatgccattcatttatacactccctatgggatcctttctgtgggtgagcactcttcctgggcatttctcttgtatatgtgagacttaagaaactcacattttagcttcccctatgctgcacacacagtgcaagatatgaaggctataatcagtttataattctgatcaatttcaattcagtgtgcattctttatgcctgcagagttatcgagaccacagcaatgatttgtcccaaggatgactttttgacataaagtggggtgagtgggcgggtagtagtaacaagactgacataattcttcacagagaaacacggtttcgagagcaaactacagagtccaggagctaagccacacaagtgcctagagaaggaagattatcactgaagggaaagcctaagcagaacaggcttgtttagtggtcaggagaggggtctggggagagacagagaggcagagagaaaagagacacacagagacagagacagacagaaagagagagacagaggtgggggagggaggcagggagggtgagcgaacagggcatcaactgcacaagtcagctaacccagctgccactaagagcagctgtgtagagagaggacttgctgagaagtaaatccagtcacccagcttcttgctactcctggctgctgagcctagagtttagagatcgtggtgtgtatcatttgctcactctctgcctgtgtcagggcacagagttaaaaacagaaggaatctggagagagaaaggccccgtgggagaactgaactgactaaacatgaagcaataatagtttagaaagaattccacacatggggaggtgagcctaaaccttgtgctacttttaagtgttccagtctccacctgcctagacctgataaaccaggacctccctgcagggttcacaagccacccgtggattctaatgtccgttctatcttaaagccctttgacccagacctttaactctcactcggaagctcgctgagtctacacgcaagggcacgagagcgtgcgtgcgggatgggataactttaaaaactaaaaaagcattgctctcccacaatgaagtattatttcatatattgcttcattnnnnnnnnnnnnnnnnnnnnnnnnnnnnnnnnnnnnnnnnnnnnnnnnnnnnnnnnnnnnnnnnnnnnnnnnnnnnnnnnnnnnnnnnnnnnnnnnnnnnnnnnnnnnnnnnnnnnnnnnnnnnnnnnnnnnnnnnnnnnnnnnnnnnnnnnnnnnnnnnnnnnnnnnnnnnnnnnnnnnnnnnnnnnnnnnnnnnnnnnnnnnnnnnnnnnnnnnnnnnnnnnnnnnnnnnnnnnnnnnnnnnnnnnnnnnnnnnnnnnnnnnnnnnnnnnnnnnnnnnnnnnnnnnnnnnnnnnnnnnnnnnnnnnnnnnnnnnnnnnnnnnnnnnnnnnnnnnnnnnnnnnnnnnnnnnnnnnnnnnnnnnnnnnnnnnnnnnnnnnnnnnnnnnnnnnnnnnnnnnnnnnnnnnnnnnnnnnnnnnnnnnnnnnnnnnnnnnnnnnnnnnnnnnnnnnnnnnnnnnnnnnnnnnnnnnnnnnnnnnnnnnnnnnnnnnnnnnnnnnnnnnnnnnnnnnnnnnnnnnnnnnnnnnnnnnnnnnnnnnnnnnnnnnnnnnnnnnnnnnnnnnnnnnnnnnnnnnnnnnnnnnnnnnnnnnnnnnnnnnnnnnnnnnnnnnnnnnnnnnnnnnnnnnnnnnnnnnnnnnnnnnnnnnnnnnnnnnnnnnnnnnnnnnnnnnnnnnnnnnnnnnnnnnnnnnnnnnnnnnnnnnnnnnnnnnnnnnnnnnnnnnnnnnnnnnnnnnnnnnnnnnnnnnnnnnnnnnnnnnnnnnnnnnnnnnnnnnnnnnnnnnnnnnnnnnnnnnnnnnnnnnnnnnnnnnnnnnnnnnnnnnnnnnnnnnnnnnnnnnnnnnnnnnnnnnnnnnnnnnnnnnnnnnnnnnnnnnnnnnnnnnnnnnnnnnnnnnnnnnnnnnnnnnnnnnnnnnnnnnnnnnnnnnnnnnnnnnnnnnnnnnnnnnnnnnnnnnnnnnnnnnnnnnnnnnnnnnnnnnnnnnnnnnnnnnnnnnnnnnnnnnnnnnnnnnnnnnnnnnnnnnnnnnnnnnnnnnnnnnnnnnnnnnnnnnnnnnnnnnnnnnnnnnnnnnnnnnnnnnnnnnnnnnnnnnnnnnnnnnnnnnnnnnnnnnnnnnnnnnnnnnnnnnnnnnnnnnnnnnnnnnnnnnnnnnnnnnnnnnnnnnnnnnnnnnnnnnnnnnnnnnnnnnnnnnnnnnnnnnnnnnnnnnnnnnnnnnnnnnnnnnnnnnnnnnnnnnnnnnnnnnnnnnnnnnnnnnnnnnnnnnnnnnnnnnnnnnnnnnnnnnnnnnnnnnnnnnnnnnnnnnnnnnnnnnnnnnnnnnnnnnnnnnnnnnnnnnnnnnnnnnnnnnnnnnnnnnnnnnnnnnnnnnnnnnnnnnnnnnnnnnnnnnnnnnnnnnnnnnnnnnnnnnnnnnnnnnnnnnnnnnnnnnnnnnnnnnnnnnnnnnnnnnnnnnnnnnnnnnnnnnnnnnnnnnnnnnnnnnnnnnnnnnnnnnnnnnnnnnnnnnnnnnnnnnnnnnnnnnnnnnnnnnnnnnnnnnnnnnnnnnnnnnnnnnnnnnnnnnnnnnnnnnnnnnnnnnnnnnnnnnnnnnnnnnnnnnnnnggtttctctgtgtagccctggctgtccaggaaactcactctgtagaccaggctgggactcgaactcagaaatctgcctgcctctgcctcccaagtgttgggattataggcgtgcaccaccacgctcggtttatttgattttttttttctaacaagtggtagttctttttttttttttttttttaaagatttatttattatatgtaaggacactgtagctgtcttcagatacaccagaagagggcatcagatctcattatgggtggttgtgagccaccatgtggttgctgggatttgaactccagaccttcggaagagcagtcgggtgctcttacccactgagccatctcaccagccccccaagtggtagttcttaaccacgccttactccctgcttacaagatagtgttgctggtccctcattatatacccaccagatagtcagtatttaaccatctgtctagggaaaaggctctggtttacagtgttttccagtttccctggtataaacactctaccatggccatttcaagctacctatgtggaagaaatgccagtcaactccagcacaccaaagaatcccttactagattctcagtggaatttttttccttacatcttttctgatccatttgattcactattgttttccttacacaatgaagaatgttcttgaatgaacaagtggaataattctgtcattcacagaaattccttcacagaccacatgccaggcatcaggctgagtagttgagcttgcggagtctgctcctgtgtgacaggcaggataggttcatgttatttacaaattaagcattaagttagaattgttgtgagaactatagggggaaactgtgagggagaacttgacaaatgcaactgatgtctctttggaaaatacactttaaaaaatattatatatgcactctgtcttcacacacaccagaagaggaactcagagccccttctagatggttgtgagccaccatatgaatacagggaattaaatccaggacctctggaagagcagtcagtgttcttcactgcctagccatctctctgcccctcataaaatatactttaagatgtatcctaaaggatacataaaaattaggtaggtgaaaagcaggcaaggaaggggtataaacatttaaggttaaaaaaaaaaaagagcaacatgttcagtcttggagcatgaaaaatcttgatttgaaggataaagaggggaaatagagaggcattaactaacactgaagagtagccaggaattgtatagtactctacctcgaattggatggttgggatatcacgctagagcatcaggaagccactaagacagttaagcagaggagagaccagagggagttgctgcaagatcctgaggatgaagtctttgaacaggcttctgaaagagatgatgcttgactgatgtctcaagccatacttgggtcaccaggcaaagaaggcagaaggctgtgccagggtaacaggaactctgaagccaaggtctcttccatacccagaagtgggtttatcactcttcagtgaagtcctccaggccttgagggagaaagttgtttttcaaaagcataaggaattgtccaaaaacttttgtacttttttgtcaaatggaagtgttcaatgctaggaaaacaagaaggcatttggttagagcccagtcttcgtttattcctttgactttgtttaataagattaatctcttaacagtctcccttgggtcagtacaaatcactcatggtcataaattacgacattctaaaaacagtatgaaagaacagcctcagagagccagctggcaagctcagtattcatggggcaattctctgggactgggagctttccagtccacactgcattctcatgtgtgtctggggagagaaaactgagccttggggttccaggtcacaaaagaagtctgaatactgtccactcagaggatcatggggattttttctttttcaaggggtttggtgattttctgactaccacactctggggattttgaggatatttagcaaacactgctgctgaaattcttcccctgagccagtgtagtttaatagaacgggtgtatcttggcacaactgtaagtaagtgaatttcatggttagtgtggtggaatggggaannnnnnnnnnnnnnnnnnnnnnnnnnnnnnnnnnnnnnnnnnnnnnnnnnnnnnnnnnnnnnnnnnnnnnnnnnnnnnnnnnnnnnnnnnnnnnnnnnnnnnnnnnnnnnnnnnnnnnnnnnnnnnnnnnnnnnnnnnnnnnnnnnnnnnnnnnnnnnnnnnnnnnnnnnnnnnnnnnnnnnnnnnnnnnnnnnnnnnnnnnnnnnnnnnnnnnnnnnnnnnnnnnnnnnnnnnnnnnnnnnnnnnnnnnnnnnnnnnnnnnnnnnnnnnnnnnnnnnnnnnnnnnnnnnnnnnnnnnnnnnnnnnnnnnnnnnnnnnnnnnnnnnnnnnnnnnnnnnnnnnnnnnnnnnnnnnnnnnnnnnnnnnnnnnnnnnnnnnnnnnnnnnnnnnnnnnnnnnnnnnnnnnnnnnnnnnnnnnnnnnnnnnnnnnnnnnnnnnnnnnnnnnnnnnnnnnnnnnnnnnnnnnnnnnnnnnnnnnnnnnnnnnnnnnnnnnnnnnnnnnnnnnnnnnnnnnnnnnnnnnnnnnnnnnnnnnnnnnnnnnnnnnnnnnnnnnnnnnnnnnnnnnnnnnnnnnnnnnnnnnnnnnnnnnnnnnnnnnnnnnnnnnnnnnnnnnnnnnnnnnnnnnnnnnnnnnnnnnnnnnnnnnnnnnnnnnnnnnnnnnnnnnnnnnnnnnnnnnnnnnnnnnnnnnnnnnnnnnnnnnnnnnnnnnnnnnnnnnnnnnnnnnnnnnnnnnnnnnnnnnnnnnnnnnnnnnnnnnnnnnnnnnnnnnnnnnnnnnnnnnnnnnnnnnnnnnnnnnnnnnnnnnnnnnnnnnnnnnnnnnnnnnnnnnnnnnnnnnnnnnnnnnnnnnnnnnnnnnnnnnnnnnnnnnnnnnnnnnnnnnnnnnnnnnnnnnnnnnnnnnnnnnnnnnnnnnnnnnnnnnnnnnnnnnnnnnnnnnnnnnnnnnnnnnnnnnnnnnnnnnnnnnnnnnnnnnnnnnnnnnnnnnnnnnnnnnnnnnnnnnnnnnnnnnnnnnnnnnnnnnnnnnnnnnnnnnnnnnnnnnnnnnnnnnnnnnnnnnnnnnnnnnnnnnnnnnnnnnnnnnnnnnnnnnnnnnnnnnnnnnnnnnnnnnnnnnnnnnnnnnnnnnnnnnnnnnnnnnnnnnnnnnnnnnnnnnnnnnnnnnnnnnnnnnnnnnnnnnnnnnnnnnnnnnnnnnnnnnnnnnnnnnnnnnnnnnnngatgacccagtgactgcatcaccatataaacacatgcaccattaacatcatgatgcatgctggggagggagcaagcagggtctgcgctggagtgcacagccagccagtgtgtgaggccaaaactcctcatagcaccaggcaaactggctgtcaccctccaggcacactgaagcctgggactgagggccctaatactgttctcatacaagtcaatggttttcattgagctatgctggaagtctgctaaggtccccagagctgagaatacctgtgacagatgctgtcagtcacacgagaatacaaagcacagtttggatggagtctcccctgttgaacagagttcagattcggcagcctactagagggctctcagcatctggtgttagcaatccttcccaagctctcctgccccgttccatggaattcccagagtaaactccaaatgccaagcctctcctggtctcctgcatatcagcatgtcccctccgtctccattctcctgcttagacctgagcagtttaatatgtgagagtgtaaatcttaagtttttttgtaagggctccagctcaagctgcagagagatggctccatggaaaagaacactggctctcttccagagcatttgggtttgacttccaacacccatatgacagctcacaacttttctaactccagttctaggggatatgatgccttcttttggcctgcttgggaactacattcatggatgtggtgcacagtcgtttgtacacgcaggcaagcacccatacacataaaaataaaaagttttttaaaaagtgcccagtttatttaatagagatccgtttttatcattttgtcaatttaatgtttatctgaaagcacaatacaaaattcaaaggccaagtacttatttatgtatgtttttgtgtatgtgcacatgtgtgtgtatgcacatgtgtacatgtctgtggaggtcagaggacagcctcagctgttgttgctcaggcaccaggcaccttttgcttgagggtctgcctatgtctttgccaagggtgtgaggcaagctagcagggagtgccagcgattctgttccgcctcccatctcactgccaggattataagtgcctgctaccaactttatatgccccagtacaggggaacgccagggccaaaaaaaaaaatgggaatgggtgggtagggaagtgggggggagggtatgggggacttttggggtagcattggaaatgtaattgaggaaaatatgtaataaaaaaaaaagaaaaaagaaaaaaataagtgcctgctaccatgcttggctatttatgtgggttctggggatcaaactcaggtcctcatgttgccaagacagtaactttgcagactgagccatcatgcccaggaagggacaattagagaacctgcattgtacaaagtaaatgagacaaatgcagacccgtggatgttcatggtgctaagaatatgtgacagtagagggcttatccctagaaaaggggcttatggctcagcagttcagagcacttccagagggtcctgagttcagttcccagcaaccacatggtggctcataaccatcagtaattggatctgatgccctcttctggggtgtctgaagacagctacagtgtactcatataaataaaataaattttaaaaagattttaaaggcagggggctttatgacaccccctctgaggccaaggggaaatcacagaatggggagcagaaagaatgtaagagcgggaatatgggagaaggaccacagaatgcactctccaggacatagcagccattgaaatcacgctgttccagcagccctggccgcctgcactgggccttcacaagactggccatagttaatcatagatccataggaacttatgggcccgactcttccttgctgagctattgcctacagatggattcctggggaaggacagtcattatctttagttgtatacccattggtaactccatcccccaggatgtactggatagtcctaaactcaaggtttcacagaaagcccagggtaaactcagtgggtcacaggatgaaatgacatgaatatggggaagagactggtagggagaaagaagagcgagagaaccagaaaagtattacttgtacaaaattgtcaaaaactaatttaataagggatattttagtaacaaggaaggatgatgaggctggagaggtggcccaaccacaaagagcatcctgcggaggacctcagttcagttccatgtcaggtggctcacaacagcctgtgtcaccagccccagaggatctgaccccgtgctccctctgtaggcagctatgctggtgagcacatacaaacacacagttaaagataaactcaatctttgtttcagtggtacagactctttttttccttttaagtataaagattagagtcagcagctgacagttttctgggtaactgagttttcatcacccttgatgtagtgatgctttttaaccaaaggaatatctctttaattcattcagtcccctttatgctctctggcttttgctgattttaatggcaggattgtaactagagtgtcatttctgtcatttcatggcatccaaggagtctccttgccagaaaacagcatcatcttgtctgcccacctgtgccaaggagaggctgactcactgatgggttgaaggtgcctttaacctcttcttcctctaacgtattcctaagcccatggctgaggagaacccccatacacatgttcccatactgcgtgtgaatgaccagctgctcagcactttgtggatatgtgatgactaactcaagccagactgtcaatagtcactcctctgtcactccctgtaatttggctcgtcactcatggcatctggtgtcgattgtgcaggtggacaagcagagcacatacaaagttttcctagaacctttcctatagtcagatgggaagaggaaaggatgatggaaatctaaagatcggtgttgtgcttggacttgccacgggtctatgtcagtgttctgttgccatgaagaaacacaatgggcatgccaactcttaaaaggaaaatatttaactgaggctagcttacacttacagtccattattgtcctggtgggatgcactgtggtatgtaaggggacaaggttctggaaaggtagctgagagttctacatcttgattggtaggcagcagaaggacagagtacttgggcttagcttgagcatttgaaaccccaaagcccttcccaagtgacacactttctctaataaggccacacctactccaacaagacaacacctgctataatagtgccactccttggtgagagcctgtggggtccattcctactcaaaccaccataccatgtttccagcagactgttaagtccgtaccttacttggctgccttatctgcacagtgtcaaaagcagctcaaaactaagtcatcccggcatgtgttggtgaagctatgcatgccagagattaggaatggtactttctgggagcaattgaacctcttgcgctcagctcgactcatatgagccctcaaaatatgttcagagcggttttcattaccacaggaaaagacaaatattaattaaaattattcagtttccatataattccaactttgaaaatgtttttaatatatgctaaaatgcacaaaatgtcaccagtgttttttctgggtagtagactgcaggtggagttcccttttatctattttgccctcaattttctacaatgataataatatattaaaatgtgtaatgtttctaaagattactgtagtaagtgctatagagttgaagtgtcatggaccaatagctcttctcctccagagttatgtgctaatggtgcaattttgtctcagtccaggatttgtgtgccacagaggaccatggttgtgagcagctgtgcgtgaacatgctgggttcctttgtctgccagtgctacagtggctacaccttggccgaggacgggaagcgatgtacaggtaggtatctctccagtcctgtgtgccgaggaagggcacattatgaataggaaggacagtgggtagaacaaacatgcacaaagcccagattgtcctttgggttttaatgaagttcttggttttgtggtctagtttttaggcagattttgaattttaaagacttagtttttacttggggtcagtatctgtttattctagatcattcacataaaccatgcttgaagataatctatataaatgtaattgctttctacttcactgcttgaaaagggcagagcgtggggatgtaactgtaagctcatgtattatacatacattttacttggtgatgggcagggagggatactatgcagtacctcaaaaacactggcagtcttatctctcactttggacctgcaggtcagtgaaaggctcaactgtgtgcactggcatcatggtcacagaaaataagcaatctcaaacataaagctggggagggggtctccagcaagtgcgagctacaaacacagactcacagctgaacacccttccaacttgaggacaccacgctgagcgctgagcgggttaggggttgggctagcctctgatttcttcactgatgggttgtagttttccttagcccttggcgaacaggccagaaaacccctaatatgtatgcaggaccttcctgattggctaaagtacccttgcctgatcttatttatcattagagcaagaaatagtaggtaaataacagatgttcagtaaggtgagctgaagtgaacatagagtcctgaccaaatctagcttttctgttctatagcccattgctttcagaggtcatgttgattctcttcatgtcctgtttcctttatgcttttgtattacttttttttttttttttttttggtttttcgagacagggtttctctgtatagccctggctgtcctggacttcactttgtagaccaggctggcctcgaactcagaaatccgcctgcctctgcctcccaagtgctgggattaaaggcgtgcgccaccacgcccagctcgcttttgtatttcaaatgcatattttccagcatacctagattgttaggtttatgaaaaaggaaaacgacaacaaaaagcggccatttgctatttgcatgagagtaatgagagtattgcggctttgcttttatacactggtgagtttgaaaactaccctcatctgagatcagcaaatggaatctgtctcctaagccttggagctatttactggggatggggtgttaatttcctggtggcaactatgacagagtgtcagagtattctgttgacacaccgccaaaacagacgtcaaccctgatccaaccaattattattttgcttcactaattctttattgtacaattaatatttaaaggttgagaaaaatcactgctaataattcattgcattttctaccatagtttcccccatagaaatatgtactacaaaacattttttttgcgcctttctgttgttaaatgagtagaaactttgtgaactgaaaaagaaatgaaaagaaaaaggtgggggatgggcatatgaggaaggacgagatagtgccaaggaggcaggagaaaagttctaattgagtgagaggagacacagaatgaactaagagtgtgaaagtcacagaggacagacgagcaggaggccaactcctggcccttgggaaactggagggtggtggggaacccattcctctccgttaccaaataattgtctaattgtcccagagtagtggagaatctttgtgtctctcaggattatgctgtaagcttggaatttgacatttgctgaagggtgagtccatgctgtggttgccagggagcagcactgtattgtattcatccaagaagagtgcttttagtgctaatgcttataagcatatgagagtgtcttgggctggagagatagttcagccattaaagtctaggctcacaatcaaaatgccaagtatgtcttgcctgtatttggccatcaagcagaaaaatggtaagccaagagaaacatatatcctaaggtggtgcacgtctcatccccatgatggtccttacgttaccatcttccactgcccttgacagccgctgaccaagatctatgaggagataggtgtgagatgaccaagtagaactctgtggccagtagcctcagttaaggggtcaaatttctagaaaggcagttgctgcatcgagagcccagagaggacagaaatggagaagagagacatctggagagctaggttggaactatcactgtgccctgagtgagtgtcaatctcttaggtaccgactcatgagttctagttaacatctccacccatctgagttactgaactgcatttactcattgagatgccctatgtggtttagtggagctcctgactttgaaatgcgttagctgctattgaagctgtattcattgtcaccccactctgtacatcactcatggactgtgctttttctctgggagtgcgttttctcgtgaacttgcttacccgatgtttactagtggctttgtaaatgggggtagccttggtcctattttccttccaactatctgagcagagtagaaactgagcaagttgaactcttcctcgttaggttgaacttgcattgccgtttctgtcctttgaatgagctctccctcaattagtttttaaactgcaaattcaatttttcctttttgtcttcattcattcatgctctcccaataaaatacctaaagctggataattcattagtagaaatgtattctaaatggtacaggctgcctggtgaaagttgctctctgttttcaaggtggcaccttcaactctgtgtcatcttgtcatggaaggtggacaggcagacgggactgaatactatggagacctttctaaagattggttttatttttaagtgtgtgtgtgtgtgtgtgtgtgtgtgtgtgtgtgtagggtacatacatgtgagttctgaggcccatggaggccagaagaggaagtggttgcaatctgccatacttggatgctgggaacagaacctgggcactctagacgagcacttcactcaagcactgagctactgaaggcagagcccttgtggtatggccacttactaaaggccacatttcccagtactagtgcattagaaattaaatttgaacatgaattttggaaggacataagaattcaaatgattacactaatttgcttaaagtcactcacatctggtactggcttgtcagtggtatcgaaggcgcaacacactgactgattccgtcatcactgaactaagtgctcctgagctaaataaatggcgtaggtgtccatacgtcgatcagtccaaccttatgttcttagagtgatggtgataaaaatgtacttgcatttattgactgttactggtcctggcacctctctgaagtattttacatgtatgacagtcatcctgtgtggaaaataccattgtcattgcttttatacatctctggatttctttatggttcaaccacctcagtctgtaaagtaaggataataacatgaagcttacaggtcaatttaacatgtggctctattagagtcagataatctaccaccatttcaatgtctagtggttaggtacttgatctcagttagatgcttgcatttcctttgtgactgctttctatgggtgactacatgtaaggatgtctctaaggtatgtgcactagttaacttctctgttgctgtgataaaatatcatgacaaatccaccttagtctttgtcactgcactaaagtactgtttatgtctgaagacagctgggtggtttctcacacattgagcagagactacattcagcaaggctcatttctgactcttggccctctgtgatctatacgcctggacaaggaatgatggccagggagttccagtattcttctcatctttgaaggtgcacatagagactccaggcagagataacggaagggattttgttggagtgaataaggagagtggtcagctccagacatctgcccataaccttggccttccttttcaaaagtacaattttggaacttaggaagttatgcaacaaatccaaaatacttggtaaagaaagaccaagatgagtccactagaactttctgtatcctaaaactctgaggttcacatgactggaaatgggttttttcatgtccaactgctgattggtggcctggaccaccacccctaagtggcctgatactgagtcaatgacagcattgaaacattgaaattgtatagaccagggtctcaggaacttccagtcactgaattcagcccttccttggttcagacaggtgtgcacacagaggacaaagcagcctcagaatcagcccgagagaatctcattctgtgacagtggcctgtagctggctgaggaatggaaaataccataaaaaagggatgccctaaaaactatgagttcagctggtagggcatggttatatacaattgtaacccaagcacttaagaaacattgctacaaattccaggccagcttgacctacatactaagagactctgaccctgccataaacctcaaaacagacagctccattcctaaacatctcacctatgtacacaaacatatcttaattgttttaattaaaaacaagtgtatgtttaataaaagtcatatttaatagtagtttcaaaacattaaataggcttatttgaaaaaaatagcttatttaacatctttattgtatacatcattcctgtgacatattatctgggatttttccagtttggagttctttaagttggcacaggatatgaaaatttctgtaaaataatctagggtcaggatccttgttgatattaataaaaaatactccatctttcatatttataataccataaaaattattgttctcagagtaactttagttggtaccaagcctcaagtttctccgaagttattaacttaatttttatttttaagaaaaactctgagtgcttatacttacttgttattattatagttagttacaatatcatgaacagatgtcatgtatagtatgttgttacaatttaacagagactattaaaatttatcatacactagaatcccctagggacttgttgacacagattccaggttcccataaccagaaattctgatcccacttgtctagggcaggaccagagaattgatattgtaggtaaattttcaaatgattgttgatgtgagcagttcacagaccacaacttgagaacttatgccttacagacataccatgtggtcagcggaagaatgagggtgttcaagagcacaggtgtcccaccacactgctctataagcacacatctcagccaaggtgagatatgcacagatagatagtctagtatgcagggactccaactacctcagtcacataaagtcccagaggccttaaagggaaagagagctttgatttatgaagaattgtgttcagctttaaaagctgcttatgactcctttgatgggtattttgttccctattctaaggaggaacaaagtatccacccattggtcttccttcttcttgattttcttgtgttttgcaaattgtatcttgggtgttctatgtttctgggctaatatccacttatcagtgagtgcatatctaatgacttcttttgtgattgggttacctcacaaaggatgatatcctccagatacatccatttgtccataatatggacatataagatggaatacagggcccccagtggagaagctagagaaagcacccaaggagctgaaggggtctgcaaccctataggtgaaacaacaatatgaactaactagtacccccagagcttgtgtctctagctgcatatgtagcagaagatggcctagtcagccatcactgggaagagaggcccctaggtcttgcaaactttatatgtcccagtacaggggaatgccagggccaagaagcgggaatgggtaggtaggggagcagggcgggggtagggtatagggaactttcgggatagcatttgaaatttgaaatgtatataaagaaaatatctaataaaaaaagctgcttatgtagaatgttatcttatatagtttcttctatagcttccaaacaggggattatgagaagttcaaaagaggtgaagaatctgagttctttgtgatatagtaatgtgacccttgtctatgtagcaccagaaatatcataggacttgaaagtcaagtgctatgtattaaactcacagatactaggggctattagaactacttgcagaggtgatgttttaaaagctttgcttccgactgaagcttgattcactcagaaagcaaaagaagcacacaacacaggctgttgctctttaaggtcttggcttcccctctgcatccttcaggtacggtgttggatgcactactgtctcatccatgcatgatttttcttgtaaggaactgcaaaggccaatggagtgcacagcacagtgatagagcacttgcctaatacgcacaggctctgggttcagcccttagtacagaaaccacaacaaaaagtacgcatgtatcaaacatatatttatctatctaatcctaccacttgaatttaacagtaactcttacttcccatttgtgggctctactttaggaaaaggatataatcactatacatatgcagttttgagatctgctttttaaaacgttaccattgattatttctgggatggggtagtgcacatgccacagcacacatgtggagccacaggacatctatgtaactggttctctccttctgccccttcatgggttcttaggagtctgactcagtttgtcaggatgacacagtgtctttattctgagctgtcttgcctgcctgggatctaatttttttcaccagactttgtatgtctatgagcaatgtagccatcacaactataatgctaatgtccccttgatgctccagatggtagtgtgggtcctcctgccacaatcttcaaaccatctctatcttagttcttggtcgagccatccttcctatggttctgtccaaatgtctggagttgatcttgatacttttctctggattcatctctaattcagcaggaatcccattggccccacgtttaacacccagggattggccctagggctatctaccaaagtgtcctaaatttgggggacttaaagcaacagcaatgtcaaaaatataggaaactagaaacctgaaccaagatgccagcaaggccatgcacacaacaaagggtcttcctgccccttcttaatttgtgatactaatttgcagtcctgaagtctaataatcttcacatgataccttccttaacaaagtgtgtgtgtgcatgtatgtgtgtgtgtgtgtgtgtgtgtggtgtgtttggtgtgtgtgtgatgtgtatgtgatgtggtgtgtgtggtgtggtgtagtgtgtatggtgtgtgtttggtatgtgtgtgatctggtgtgtgtgtgtggtgtgtgtttactgtatatatgtgtatgtggtgtgtgtttagtgtatatatgtgtggtgtgtgtgtgtgtgtgtgttatgttttataaaaagatagagaggaggaatatgtttggtggatgtgcagtcaggtgtggtggaagtaggtccctctacaggcccatgctgaggcatcccttccccctgagggaccagccacagaacagtattgtatagaatagagtttatacgtggcatggggaggggagttgagagggcagtaaagacaaagaaaagcagannnnnnnnnnnnnnnnnnnnnnnnnnnnnnnnnnnnnnnnnnnnnnnnnnnnnnnnnnnnnnnnnnnnnnnnnnnnnnnnnnnnnnnnnnnnnnnnnnnnnnnnnnnnnnnnnnnnnnnnnnnnnnnnnnnnnnnnnnnnnnnnnnnnnnnnnnnnnnnnnnnnnnnnnnnnnnnnnnnnnnnnnnnnnnnnnnnnnnnnnnnnnnnnnnnnnnnnnnnnnnnnnnnnnnnnnnnnnnnnnnnnnnnnnnnnnnnnnnnnnnnnnnnnnctctcagcttccaaccattctgtctccacctcctgtctcaccatagcagtgctgagttacagatgtgatctactattatctatctttctatacaggatccaggagttggacttaggtccttgtgcatggctagtatatttgcttgctcttcatcttcctggctattcttgttgcgtgtggcttttactaccctgccaagctccgggaatagactgctatgagcccccaccccacttcccttgaatccacagataaatgacacacacacagagatgttcattttcaacttaccttcttggtgtaattgctgggcattattaaactctcaaggctagcatgcccttatcgacacacttcccacctgctctaaacttttgttgctcagttacatctagtacctgccaaacacccttgaccatccacctgtaggagtggcctgtgtggccactctgttttgagatctcacatggatggagaactctcctctccttgccttgcatctccctgcttgcttccagagacccagaagtcctatctatcccttccacccagcaattggcccatggcttctttactgacagatcaagaaccaattggggaacaggaccttaacatcagaaccacccctacttactccttttcatcagtcatactgacttgtcttcatgttacccttattacctctgcttccatgtaaagccatggacaccagttctgagatctatagaatgttaagtccttgaagcccacatgtctcttttaaccacacaacttgtgtctctacctctcttcccgctctgcattggtcttttttgctagttctgtagcacagtacgtgtgaccccacctcctgacctttccacttacctgggacactccagatgtccttatgactagtacctaattcaatactgcccaatcacctttttagagaaccctttccagaccacctctgtcatatcccagcttccttccccgacaggtcctactcaccttgatttcctctagaacattctccatcttctaatggatgatgttatttaatgactttggtcataccaccaccaatgttaacactttgaggctgtgtgggtcttgtttgttatttactctgtctctaacatctaaaacagggcctgattcatagtatatactcggtgaatatatatatggaactaatgaggtataatccagtatgttttctcatgaaccactaaataatttacccttattataagttcttatctgactttcaaacctatttgatcactatggatgatgctactataaatatcttactgtatataaataatttcccactccagttattttctagaattaggtttgcaaatttaaatgatcagattgcttccataatgattcttattgctattcatgatttatgtaattgtttgtgctgacttactgctttgagttttcattcctttgttgtttttatggtcgtggagcctcttgagtgcaagataagtgcgctatcattagctatactaacagctgccactaagttttgtctgatctccattttccccagttcaatagatgtgccttataataattttgatttgattttctttgatttttaaatatacttgtccatatatgttttatattccagaatgaaagcctgatttagattcatgatttttagggggatgttgcatgtttatttatccatattgttttgggggggtggaggatgggaccattattagctctaattatttttgttataggtattctgacattcttctgcacccttctttgtatcctaaatgtgtgttgttttcttcagctgtggactactgtgcctcagaaaatcatggatgtgaacacgagtgtgtaaatgctgaaagttcctacctgtgccggtgccacgagggatttgctcttaacagcgataagaaaacatgctcaagtaagttacacgcacatgcacacagcgtgctattgtggtgggcactgtggacgtagaccttcctgcacatggattagcccatgctaagtcatgaaaatctgttcctattcctcctgtgtcagcctttctgtatagtcctaagattatggcttacttggtctcaataatctccagtcaaagtttttggtgatggcatcttttgttagagaaagacatgctaacaaccaaatcagcatcccacatgctgcctcagtatggctgtgcctatcatcataacagggcctgaagaacattttcacttaagctctgtggtttgtgggctccagctctgactccacgtgagggccagaaaatcgctgagccaaaaggaactgaatgtggtttcttgagggtggggtggggataggtggatggcattttgctgagaactgctcaagttttctgtaaactgtttagttctgtttgattttaactatatgcataaatattgaactaaacttaaacttctaaaattggaacagaaaaatctataaactaaaggtgatcaccagttttataaaagatgccaggagtactcttttaaatataaatgtgcagagggacactttggaacttctgtggatagatttattatcctgtgatactgtgggagtgtcacttgaggaatgcctacttatgaaatatcagggcccagtgatattttcataagatccaataacaattagaaataaaataagttatctctgcaatgtatatcaatgagaaaataggattttaatttataaaaagttggtgtactttccacctttcaaaggtatatcctgtatgtactactgtgtgtgttttcaaaggcatcctttctatttcctattctccaatccctaactattaacagcttaaaaccctagagctagagacagggcatattacatcgaaaacatatgttactggagcccaaacacgagccagtaaaaacaaaggaggtgaagtcctgggatgaggacagatcttggctggattttaaagtaagccatcatttatcacacaaagcagggaagaggggctgctgaaagaagaaaaaagtgctaagataggagcagcttagtccagagctggactaagatagggtatttagacctccatgcccagtacatagctcatgtacaactgtttgtttgcttttggaagggatgagtggtttagtaggctgctctgctccgagtctcccctcctttctgtacaaaacttgagcagttcccatcaagatgctgtctacctagccccaccacaccctcaagaaaccatattctgaactagaaaacaacagtcaggctgccattgtggctgggaactgtggtcactgggctgatgaatcagcattcctgatcaaaggtggactctgtgggcaatcttgggcaaaccttatgccacaatgtcctcaactgaaacaggagatggtaacacttaaagataattcagtctgttatcttaaagactaaagaagatcatttatagaaatgatttatcaaattgctagtgctaattacattttcacaaaagatgatgctgggatctgggtacatcacacagttggtaaggtgactgctgtgccagcaaggagatttgagtctctggcacccctgtgaaaagaaacacaactgaggaggtataaacaggaggctccctggggcccactggccaacgagtctagacaaataggtaaacttcaggctcaaagaaagatctgatctcaaaagattcagatggagaacaattgaagtatattcccaacgctgacctctgccctccacacatgtgtacatgcttgtgcacacatgaacacatacacactaacacaaagataacactagccacaaagattttagtattaatgagcatgtaccatatgccttgacaaagcagaaaggtacataaaaactcaagacttctgttgaaagttagcgggaacacaagtcctaccacacagagcagtttagtcacagcaccaggacacatgtgacccagggtccatggtgtgatggagacatcctggactagggaagttggaagcatggtcccatggtcaaaggaatgggggaaaacacatctgtctgatctcaaaacttcctcctggaaggagtctcgatcacattcccactttagtttccagaacagcttcatcctccatactgtccctcagcacattccctattactaaatcctattccaaacatgagagtggaacagacaaggtcagagcttctcaatcagatctggaagtagaagctgcagtgtagagccctgggaagagtttggctgggagtcagggaagggcccttccagctgggaggtctcaccagagaggcatggagccagcagctcagctatcttcaggccatgttaaaggcaagccttgaagctggccagcccaatgcgtgggcagagaggaatgctgggaaagctatggggttcagggcaacagcactaggatgaactgccccctagaaaggccaccttcccaccatccttggggatgggcaggagccagatggaaaggctgacaagaaaaagagatgtttcaagtattttaaaaaaatggtgcaggaagtaaagagaaagcctgcttgtacatatacaacgctgtggtgtccctgtctccagcaggacaagaaagagctgagaagcaaccagtagcaaggattgtgacacaagggacaaatccagcagcaccaggccttgttagtagctttgaggcatcacagtcccagctacctggccatcgctctcatgctgggaaaaagaaatccagttcctacacacttccaaaaaattagtaaattatttttttaaaaatcaactcattacatttcagtctctatagatctatttaaagatatatttttttctgggctggagagatggctcagcagtcccctctttagaacaaatcatatatatatgatatatatatatcatcaaatttgctactgtggggctggagagatgactcagttgttgggaacactgcctgtttttccagaggatcccaatttgattactacacccacatggtaattcacaactgtttgtaactccagttctatggcatccaataccctcttctggactccaagagcatcaggcatgcttgtggtgcacagacatgcagacacacaacatagccactaggtattactctattaggagtagtagtaataatcatttatccattctaccatatttgttaagtagctactgtgtgctacatatagctgtagacacatggcttacctctcagccctaacaccttagagcaggaactgtgagacaaggcaatgcctatgtcccagtgatacacctcctccaacaaggccacacctattccaacaaggccacacctcctccaacaaggccacacctcctccaacaaggccacacctcctccaacaaggccacacctattccaacaaggccacacctcctccaacaaggccacacctactccaacaaggccacacctactccaacaaggccatatctactccaacaaacccataccacttaatctttctaatccttctcaaacagttctattccctaacaactaagcattcaattatatgaacctctgggggccattcttttttaaacctaagaacataaaagcacaagaatttatgcatacagatttgaaaaacctattacaaaaagctgtttaacagattaaaccaagtaatgtacagaatattatacagatattaaaatgttttatacatgcaaatgatatgctaaagtgctcctgatttaatgctatgttgtatgatcctaaaactacaaaaacatatccatatgtgtacaatattaaaagagagaccattgaaatgggtcagtgcttgaacaagaccctgatatgagtttaagctctggaacacacctctttttgctgggcggtattgagtcagagacaagcaggtctctctgagttcaaggtttgcctggtctacatggtgaattccagagaaatcctgtctctgaaaaacaaaaaccaaaaaaaagaaaaaagtggtggggaagcaatgaataagcaaacaacaacaaaactgcctaagaaagacctgaacagaccacagcaattgatgtgagaatcttgtgctgtcccatccatagacaaagaactacaggcaactcacggatgcccagggtgggagaacagatcttccccagcgaagagcccttggttatctaatattaaatggtcagccctgaaatcatccacatactagccacactaaacaaagcagcaagatgtgtgggaaatataacccatttggaatgaacaatggggattgtttgattgcagaggtgccgatgtgacaagggaactttccctaggcaggtgccgtgtcctgatatggtctaaagggttaaagctgggcctccctgggatcatctgcatgcagtgtccttctcagactcatcatatctggatatgaatctgacaccttcataaaaagggggtctagcattatagcataaccagtaagaagtggttagctcaaccagagtgggtctaccagctatgtgtgtgtcaggaaagatttcagagctggggacacctgctggggggtgaggctggggacagggaggaacagagctgccagtctgagtgaggactggtgttggcgcaggtttgcctggtacagggcctcttcatacaggtttagggtttgtcaaaatctacagtaaccagtctcaggattcacgattgtccaagtcaagtcataaggctggtgtgggtttctggtctctgaatggaggcgtaggctggggggcagcagtacacacagctagtaaaaacagcaaacttcagactgggttaattttagcttgaaagtattggtgcccctatgaactttccattccagcgatgactgtgaattcaggcaatcttcttctggggagaagggattagctggtctcacatgggtgcagtgcacccaggcagtgatcccatccactttaacagctgttggcatgctcagcaaaatgacgtactgttctttccaccggggctccaacacattctggctaaatccgttcatgtagacccagtctccaggttgaaacttgtgtggttccagaacagggtctgcttcatagagggcactcgatttaggccaaacctgctcatgttcatcatctaattctgcaatagctgttgactgaaggttaggtacaataggagcaggaaatatatgatttcaaagggggttaatcccatctggttaggagaattcctcacccgatacagggcaaaggaaaggaatgtcatctagaccctccctgctagtttccatggctaatttggtcaaggtctcttttaatgtaagattcaccttttctgcctgaactgaactttggagtcagtatgcacaatgtgatttccaatctgccccaataaatctcgctacatcctggcttaccttggacacaaatgctagcccattgtctgacctatcatatgatatcttctagcaacttcttagacactacctttgcagtttcagtctttgttggaaatgcctctgtccatcaggagaaggtatccacgaacaccagtaagtacttatagtcatactttcccagtttgattgctgtaaaatcaactttccagtagtcccccagtctcttacctcaaagatgagagcctggatgtttggcagtgttgtgggtgttggttaaatggcaagctttcagcttgacactatattctcaataatacattgcatgaaagtcactttagattgtctcactgcatcagccatccatctcactcccatgtagatgacactatagattttcctgaggatagatcttgccagagaggtgggtagtattagcttaccttctgccgtctgccaccagacctctgaacaccgactcatgggctgattcttggcccatttgatctcttcctccgaatagactgggcattccggcaggttggggtttggcggttctggtagagtcgcagctaacatggaagcagctgtttcctctagggccacctctttggtggctttggcggccaagttgtcacctctagccactgccgttattcctttctgatggcctggacagtgtgattaccactctctttggcagccagagggcttcaagtcattgtagaatttcatctttgtttttgatagtttttccttctgcagttaggagtcctctctcctggtatatagctccatgtacatgagcagctgcaaatgcatactggctatccatacagatgttgacagccagtcctttttccataataagggcctgggatagcaccatcagttccagatattaggaatgatccccttccgtgcttcttgggacatgggatattggcagacccatactgggtctgctcctggcttatgctctacaaatacagggggtcaatgttttaccagccctgtgtctccagtctctgaccaagccttgggaaactctgccagccaggcatccaggtctttttttttgggggggggggaggtggctggtgactcgtacagtctagactcagtctcagaggccacgtcaagtgtcagcacctggactggtttgccgttctagtccattagccagattttcccagggccaaaataaatctgggctctcatttaggctagtagatctctccccaataaggggtatgggcattcaagtatcactataaaggagtgagatacccatctcattcccaagtccactgtcctttgggtagtccctgaatattgtttggcacctatggatccctggacccaggattttttattatacaatgacccttcagcctttccaagcactgaatgttggactccagtatctaccaggaagtctagaggctcccccctccattataagggttacccagggctcagggagggggtccaagccctgactccctccgtcttcctcttcctcagtgaccacggtcttgttttagggctttttctttgggcattctctgacccagtgtcctttctccttacaataggcacattggttcttacctaaggctgataggcatcctcctccaggctctggccaggggtcttctctaggttctctcccttctgcaatgttccagagcttcctctctctctgggttaccattggctagcaggaatctggctagatctctgtgtaatatcttccctgtcttatctttagattccctgttatggaacactttctcctcaacctctgctaaatctctcaatgaatttccccctagtctttctagtttctgtaactttcttccaatgttctggctgactgatttataaatgtcagcaccactatgttagaattctctgtttcctcaggatctaagtgtgtataacagcggaaaccatccataatcctctcgaggaactctgcagggctctcattatctctctgcctgacatcataaactttagccagattcgtgggttgcttggcagttgctctgagacctgccattagagactggcaatagactggaagacactccttacctgtccctgtgttataatcccaagctggtctcctgagggaaaccctcgtcaatatcagcttgattctgagttggagtgccataggcacctggaacgttcttcccggactccaggatgatgcgttctttctcctctgttgtaaagagaatctgcaacaattgctgacaatcatcccaagtgggctgatgggtaaaaaggatggtgtctaagagactaatgagctctttagggttgtcaaagaacctagcatacactcttctccagttgtaaagattagccttagcaaaaggccaatactaatagggtttgtttccctgttcatcaattgggcctgtccctttcaggggtaagatagtggaatctgcctctggtgctacagcctggggcggtgtgttggcatgcctgcttctagtcctgtgagctggacctccctccatctccaaggtggacactattggaacctggggcgctccttctgggggatacatgggcaggagtagagtcaatgtagggatcactggttctgctgcaggaatcctctcgggtggaaacgctggggatggaagtgcctgggcaggtcccctgtacaggggcacaggtggaaactccgggagtgaatatacctgcactggtcctgcccgcatgagtggaaacgcaggaagcagaagcacctgtgcaagtccatgtccaggaacacagtgggaggcggggtctcagccaaagcaggggccgctgcctttgtcagagctggtgcctgagtgtaaggcagtgggaaaatgacttctggcgtagtgtcctgtaaaatgggatagaggggctttgaagacttggagacttcctgcttttgtcttttgccatcagagtggacatgattcctgaaggctaaatatctttggtaagaggcaataggaatgatttcacccaggatagtgggttggcaaccaaatctttccagactacaatgtaggggacttgttctggatgtccctgaaccttctgcaatactttgtcttccaccactagcactgtggagagatagaaagtcccctctagtggccgtcctacttctgaaggtaggccactcggagctgcaatacgtgtnnnnnnnnnnnnnnnnnnnntgctggaggtctctccctaagcacttccaaccgatggtcaggaacctcatccaccctgggacccgaggtcaggaacatcttcctccctcttacagccatgactgcccagcacatctgctttagccacttctttccacttgcactgttacctcaaggctttttcttttctttttttttttttttttaaatatttgtttatttattatatgtaagtacactgtagctgtcctcagacactccagaagagggagtcagatcttgttaaggatggttgtgagccaccatgtggttgctgggatttgaactcctgaccttcggaagagcagtcgggtgctcttacccactgagccatctcaccagccctcaaggctttttctgatgccaaaatatggccagaaagaacagacatgaacaatgaacaatacagaaacactgactttcaccacactggcacgctgactttagactctccggactgcagattccagagatctgctggggaataccattcagaagagcccccaaatgttgtgtcagcaattccacaggacccccaggagatctctaagaaccgctgggcctgatgtaaagaaacaagagtctacttattaatttgagtcagactcggatcgtgaaccttcccactgtgcaggagagaggtgcaacctcaagcctaaaggcttagcatttttatacagaatagtcaggggttctttggattttagggtgacaggcgaggtgacaaggcaagtcatttttcaaacacaatatcatttgttcaggcggcagggcaggatctctcaactgggaaggcgaactcttctgacctgaggagtaactttatggtgctgtcaagaactagtgtgtttttatgactagtcacagctgcctgtgacccctgattaccctccttttatcaaaaagtggggcctaatcccccccccagggatgtttggttttttgtttctttctcaaggacaggcaccagctacacctgggaagtgcttagccatttatcagtgagagtgccagcctcaacaacacggaagcgagggaggttgccatttctctattcgcaagctggcatctgtggctcctcgggggggagggggttcgttagtgggtgcctctctggaatcagggatagcaatattctggtgccagaccgggtcctctctgaacaaccagggaagggaaggaaatctcacgcttgctgcaggaaggagcagaagggaacttctgcgagagaatgcagaagcaggctgcccgtgccaattcaaaatcaaatgtcagaaagatctttgagatgaagacataatatctagatgtggaaatggctttttgaagaggctcttgctgggtcaaaattgtaagttgctgtattttatnnnnnnnnnnnnnnnnnnnnctcgtcaatatcagcttgattctgagttggagtgccataggcacctggaaacgttcttcccggactccaggatgatgcgttctttctcctctgttgtaaagagaatctgcaacaattgctgacaatcatcccaagtcgggtgatgggtagaaaggacggtgtctaagagactaatgagctctttagggttgtcaaagaacctagcatactcccttctccagttgtaaataaagattagccttagcaaaaggccaatactgatggggtttgtttccctgttcatcaattgggcctatccctttcagaggtaagatagtggaatctgcctctggtgctacagcctggggcggtgtgttggcatgcctgcttctagtcctgtgggctggacctccctccatctccaaggtagacactattggaacctggggcgctccttctggggggatacatgggcaggagtagagtcaatgtagggatcattggctctgctgcaggaatcctctcgggtggaaacgctggggatggaagtgcctgggcaggtcccctgtacaggggcacaggtggaaactccgggagtaaatatacctgcactagtcctgcccgcatgagtggaaacgcagggagcagaagcacctgcgcaagtccatgtccaggaacacagtgggagacggggtctcagccaaagcaggggccgctgcctttgtcagagctggtgcctgagtgtaaggcagtgggaaaatgacttctggcgtagtgtcctgtaaaatgggatagaggggctttgaagacttggagacttcctgcttttgtcttttgccatcagagtggacatgattcctgaaggctaagtatctttggtaagaggcaataggaatgatttcacccaggatagtgggttggcaacaaaatcttcccagactacaatgtaggggacttgttctggatgtccctgaaccttctgcaatactttgtcttccaccactagcactgtggagagatagaaagtcccctctagtggccgtcctactctgaaggtaggccactcggagctgcaatacgtgtgcattttcttccaacaagagattgtgagctctggttttcacttccttaaagtgagctaaaacaatgttggggggggggaatgagagttaacccgtcccattgcatccatcaccatccagtataacatgagactaaacactaccagaaacaccactgacaaaaccacatgcacgaaataggcacatcgtgactagaaacaaaagtaaatccaagcactaggactcacagactctcacctcggaaagtagaagtgaggtggatatgggagcagattgctggaggtctctccctaagcacttccaaccaatggtcaggaacctcatccaccctggaccctgggtcaggaacatcttcctccctcttacagccatgactgcccagcgcatctgctttagccacttctttccattgcactgctacctcgaggctttttctgatgccaaaatatggccagaaagaacagacatgaacaatgaacaatacagaaacactgactttcaccacactggtgcgctgactttagactctccggactgcagattccagagatctgctggggaataccattcagaagagcccccaaatgttgtatcagcaattccacaggacccccaggagatctctaagaaccgctgggcctgatgtaaagaaacaagagtctacttattaatttgagtcagactcagatcgtgaaccttcccactgtgcaggagagaggtgcaacctcaagcctaaaaggcttagcatttttatacagaatagtcaggggttctttggattttagggtgacaggggaggtgacaaggcaagtcatttttcaaacacaatatcatttgttcaggcggcaaggcagtatctttcaactgggaaggcgaactcttctgacctgaggagtaactttatggtgctgtcaagaactagtgtgtttttatgactagtcacagctgcctgtgacccctgattaccctccttttatcaaaaagtggggcctaatcccccctcaaggatgtttggttttttgtttctttctcaaggacaggcaccagctacacctgggaagtgtttagccatttatcagtgagagtgccagactcaacaacagggaagcgagggaggttgccatttctctattcgcaagctggcatctgtggctcctcggggggggggggggttcgttagtgggtgcctctctggaatcagggatagcaatattctggtgccagaccgggtcctctctgaacaaccagggaagggaaggaaatctcacgcttgctgcaggaaggagcagaagggaacttctgcgagagaatgcagaagcaggctgcccgtgccaattcaaaatcaaatgtcagaaagatctttgagatgaagacataatatctagatgtggaaatggctttttgaagaggctcttctgggtcaaaattgtaagttctgtattttatccccttggggaaaatggagcctgagaaccctcggctttcatggctagccatattgactttttcacgattcccagaaccttgctttctttccagagattgactattgtgcctcttcaaatcacggatgtcagcatgagtgtgtcaatgcccagacgtctgctctctgccgctgcctgaaaggcttcatgctaaatccagacaggaaaacttgccgaagtaagtaaccctggcccatttctccaaatgttcctctctgttttcccttcttggcagacctttagcatcttgtatttgtaatggatgtttgtgtttattaacatcattctgctcttattttccttttgtgtcagcagaaccttttgtgggacatttttctagagaatgaatagatgaaatctggtcatgagatttgcttagcaactcagtccatacggaagctgttccttgagatgagggtgcccctagaaagggcttgtggaaccttaagggagaaaaaaggctgggcatacagatgtgacatcaaaggagctggtttcttcaagtcttacatagggaacacttgatgacctctgagtgtggggacattaaggttctgttctcgttgattggaaggaaggaggagggtaatgcacttggccactgcagctgctctcaaaggcaacagagcatcagcaggaagggggtgaggaagtccatgtgactcagatgcctgtcacctgaaatactgagaggcatctactccaaaccagacctctaggctacatccctagtatctacagatacatgcatgcatacacacacatacatacatacacatataaacacacacacacacacacacaccagactgttcctgaaggacaccagagtggaagtcctaccaggaagaggtgcttgcctttttacatcatggaatcctcagcgactcagagtgcttagctcgtatgggttgagtagagacttgtggaatagattatgtatgaaggaatgagtgatggagctgctctgagatacgtcatcctggagaaattacagtataaatggaatttcctgatccttgtttgtgatttcctcaccatggcatttgtagaattcactggaatttctgattagtggtatatatatttccttcctttctccttccctccctctgcccctacccctccctctctttctccctccctcccttctttcctccctccctccctctcttgctgttatttgtggtttggcttgttttaagacagactctggctatgtggtacaggctggtctcaacattgcacctatcttcctttaacctctgagggctgggttctcgggtatgcactacaatacatgctaggatgtctccctgtgtgctgcacctgctacttcttcctagccatcatgtgctacatggcaagactgtatcatgcactttttgtgggtcatatgtggaactgaatctagacaagtcccatcctgcttatggcacagactaagttccatactctttctaaaaaatattaaactttatgtggttacagagcccatattttgaaactgagcctctcttacaattcctaccaccaagcctggatacaaacccctgaaacagtcaagtcttaaacgagaacttgaatgaagagattcaaactgtgaagacaaggaggtggagtatttccattagaacacacacacctaacagtatgttggatggccagcttcacagcttagctgctctcttctgctctgctgacaccttttcctagggatgaatgtgtgtggggctgactacactgtaagaaaccggttgccggtggactcctattagtggatgaggggtcttaggagataattagatctggttcagcacaaataggcattatgatatcatgcttcctgtgttactcatggggtagagaatggaaacaaatcgggtatgtagccacggatggagactttgcttgagattctgcatctcttgccagtcctctaagattcccttggcttatacccctccttccacacactgctgggggctcctgaagaggagaggcctctcaggcagccattgcacagatcatcaagagagatgtgctgagagaacagggtgggagacccacgtaaggaccccaaatgggtcctttgctaggctgtggcccctgccagagtccctaacactcatctgcatatgtttgatagtgacggctccatttcctctgcagccgccctgcttttattttttatttatttattttttagatttatttatttattatatgtcagtacactgtagctgtcctcagacacaccagaagagggcatcagatctcattacgggtggttgtgagccaccatgtggttgctgggatttgaacttcggaccttcggaagagcagtcgggtgctcttacccactgagccatctcaccagccccgccnnnnnnnnnnnnnnnnnnnnnnnnnnnnnnnnnnnnnnnnnnnnnnnnnnnnnnnnnnnnnnnnnnnnnnnnnnnnnnnnnntcttctttctcttccttgtccttctcctcctcctcccccctcctcctacctcctccctccttcttctccttctctccctcctcctcccccttccccctcattatattttctgtcatctttgctgtgagcccaggcctagacctctaagatctgtctgtcagagataccattaatgcctgcattcagtcctggattgttgcaggcagctgggagtgggaggaagtgcttatggcctctctagagcattccatgcagagggaagcaaaggaattggcacaaaatctgaggtttataattaggagcctgagatctcaaaaatgttctgagccttagaacttggggccatttacatgtaacaggaggctggtggtgactttcaaatctaataaaataaaatctgtttcaaatgaattcagtatcatctgattaaactgaggaagatactttgaggcagcatcataccggagggaagactcctggccaggtttttgccttcttcctcatctcctgctggagagtgccattgtcaattgcagacattcatcatgaaggtagtggtgcaaagcctggaatgccatcagggtctgaggctgagcaattgcattgtgacccagatgtgggctgtgagattctggattctcatactcacattggagctcatcatagctggaataacatccttaaaagctagtgtgaatttcccagttagttagtctgaggaccagtctaggaactgccattcacatcagctacatcactcgaagagactatctttattgctctagacctggatttccttagtgaggagtttagacattgtgcttcaacatttttaaccttggtgttttttctggaatttctttcctgagtcatctggtatcgtgacttgagtcacgttgaactcttcttgagtcgccttgaactcttcacgaattgatatacatcaaggacattatgtgacaattctggcatgtgtctttggcataccagaccctactaaatgaagttacatccattccacaccctttattctgctcctcagtttatggtttaaccagcagtgcagtacacagaaggcatcaataacctcaccttatttcttggcatctttggtgtctaacagtcctgattcttttttgctgtgtctccagagtgcaaacccatgaaggccaggccttggtagtgttcacatttacattggtacatctagcttagggcctggcccttagctggcaaatgactgactgaatgataattcccagcttgcctcagcaagcagtattcagcagctctttccagggattgtgggaaccctggagcctacccaagtagcctcatacagtctgaatggggggtctttctctccttagggatcaactactgtgcactgaacaaaccaggctgtgagcatgagtgtgtgaacacagaggagggtcactactgccgctgccgtcagggctacaatctggaccccaatggcaagacctgcagccgtgagtgtgccccaggggtgtgggtgctgatggagtggagaccaaccattcaccatcctttgggctcattagcatccatacccttccagagcttctgggtttcctgcaatttataaaccatcaagtgtcactgttagtactacccactccaaatgttgagttgtaatgatcaagagaatccatatgggggctagagagatggatcagtggttaagagcacttgctactcttgtaaaagacccagattctgttcccagcacccacctagtggctcattactgtaacaccatttcaggggattcaacactctctaatctctatggatgccaggtatacatataatacatacatacatacatacatacatacatacataatacatacagacatacatacatacaggcaagattctgatacatataaagtaaataaatctaaacaaaatttaaagagagttaatatatgctaagtacagtggtgtatacttaacagtctcagcactcaggaggctgaggcaaaggatggtgaattcaaaaccggcataggctctagagcaagatgtcatctcaaaaaattagaagagaacaagatgggggttggggatggaaataaataaatgtgtagggtttgtggtggtttgaatatgcttggcccatggaatggcactattaggaagtgtagccttgttagaggaagtgtgtcactttggacatgggctttgagaacctccttctaactgtctggaagccagtattttcctgactgccttctgatcaagatgcagctctctcagctcttctagcaccctgtctgcctggatgctgccaagcttcctgccatgatgaaactaaaccagtcaaattaaatgttgtcctttatagaagttgccttggtatggtgtctcttcacaacagtggaaatccaaactaagacagaaattggtaccagggactgtgttatcgctgtgataggcctgaccacgtttttgtttggagaaatgtggattttgggactttggatttggaatgacatagaatgctttaagaaggaattaataggccattctagtaggactacggaagacattggtattgaggtgatttgaactctggagatcatccttatgatgttttggtgaagaatgttgctgctttttgcctttatccaaacagtctgcctgagactaaggtgaagacatttatatttattgcattgacaaaggaaatctcaaaaaaactccagtatagactctgtcctctggtttactttcatgaagaacattttgatcaagcatagccagcttagaaaggaaaaatacaaaatgtgtggttcaaagagtaaaggggtaccaggaagtagaatgaagctaaactctgtgttcaaggatattaaatggaattaaggaagtggtgacctccatgcaagatcccacccagctaaacgtatatatttgcagttgtatgagggagggttatatcacgttaggtgttattatgacctggttattgtcttcatttggacataaggagatgtgattgtgtatcaaattgacaagggatgggttgtgataactattctcagttttcaacttgattaagatctataatgaaacgcttaggttcaggcatgatggtatactcctttaatcccaggagacaaagacaagcagatctctgagttcatggccagtctagtacagaacaagttcctggtaaaaagaagcttaagtatagctgtggtggcacacacctttaatcccagcattcagaagaccgagtctaagactcttgagttcaaagtctatctacagagcaagttccaggacagccaagcttaggcagtgaggaagttgaaaaagagaaagctggcaatacattaagaaggccatgttcctgccacagcaagcagcagaacttggcagctttgaccatgtgaatctggctttatagtcaagaatagaagagactactgggacaagtgatactggttagctggagctaaaaaattagtggtgattaagaagagattagcatctaggaagtgttttctgagagcacaaagaagctatgttccagagatagatagccaaggttgtaccttgtgttgcaattggacttggtaatgtttaaaaatcacccaggtgatactggttttgaaggcatgaaggggtcatggagagcagctgaggattggcactgtgagaggccatggaaggccattggtgaaggtgcagcttcagatgatccaggactaaaagggtcacacaaagaagttgagccttggcacaataaagagtctatgagaagctattggtcaagtctagttgcagcagaaaatcacagtatattgaagatgccactaccgtgggatgaccaccaagaacagcagcatcagtggagtagaatcaaccagagcctagagttagttctacagaggacagagttggagaagtgagccaagccctttggaggagtccagaagatgatgtgtggatcctagacattggaacaagaatctgtaaagttgaagttgcctgaatatcccaagatgttagagatgtaaaagctatgggacacctgctgaggaaagctgctaacagggagttgagccagcccaagagaaagaagtttgttgctgtcaataaagatgaatagagttggagatttgaagagcaatttgacttcagacatggagacacagagtttggagtttgcccagctggctttttgtcttatttcaggccagtatttcctcactatgatgttttagaatagtatcgtatataatatgatgttggaggtatgtgatctgctttttgattttgaatttataggagattacagttaagtgattaggtgaatctcagaagagactttgaacttcttacattgttgagactattatagactatggggacttttaaagttgaactaattttgtattaagctatggctaggtatgactcacatagattcatgtgttgaacaagcccatgggggttaagacatggaatgtggtggtttgaatatgcttggctcagggagtggcactattggaggtgtggccttgttggagtgttggagtaggtgtgtcactttggatctggactttgagactctcttcctagatgtctggaagccagtcgttttctggctgccttcagataaagatgcagatctctcaggtcctccaacaccctgtctgtcgtgtttcctgccaaaatgaaattgtaagctagcctcaattaaatgttgtcctttataaaagttgccttgatcatggtgtctcttcacagcaattgaaatccaaactaagatagggttgagggtgtaagctaagtcagtaagtagaatggtaactttgcatgcacaaagctattggttagatcccagcaaaaataaagctgggagagccaggtgtggtgatgcatacctttaatcccagcacttggcaggtggatttctgagtttgaggccagcctggtctacagagtgagttccaggacagccaaggctacacagagaaaccctgtctcgaaaaaaaccaacaacaaaaaaataaataaataaaaaataaaataaaataaaaaataaagctggaaggaggcatgggggggcagagaatggagagagagagagaaatgaatgtgtaggctgcttagaatagggctgctagctgctattagtctttgctactaaaagcatttgctaaatcagataggcctgaattcaaatctaagctctgtcacattctatatatgtgatttggacaggttgttctcccagttttgattgcctatttttaaaaattaatagcattgattccccaggtggttgtggggaataattgaggccatttcaatctcgtggtctaatgcctggtttatgataaacataatactagatacaaatatagtccatatcaacaagcctgtgaaagtgactaacggccagtaccaggttgggacaagaagtcagaaggggtagaccttggaaaactttggactacccaggctaatgtgagggggaaacagggcaacatgggaattttgtgaagttgttcctttatttccttctattggacccaccacaagcttagtgacataaacatatgagaactttcagatcttgccagctggatgggcccataacttttttcttttttgaggtacagtcttcacagccccaagccagcagaggctaagagtatgtgggggctgtgatagttaccatgacacactgagagctggggctagtggctacataagaatcatttctttgtgctttgcaaacagtacactatgtactgcttggctctgcaggcaggaggctgagtgagaagcatgcagctgttggacatttggacccttgaatgccaggaagggaagtttcacagttgaagtatgagatacagggccagcctggggggacctcattcttctctgtcttcagagggagggaaatgtggctttctaagcatgatcccagaagtcaagggggttttgaatgaagaggttgaagcaaaagtcagcactgggctgtacactttcttctgactgtcactgggtcctgagctgaggggaaggagaaggagatctttgttcaacaagaagatgcctggctaatggaggtgccaaatcctgccttcttctcagcatgtataggtttggcttgccactggccctggtagtaatctgcaacttcactgagtctaccttaggcattaaagcatccttgacttcctgactctcccagcatgccttgggaaatctagaagttcagatgtgagcccagaagagatgggggtctttataagatttgtcaatatttagaaaatataaaccaagctgtttctgcccagaagtcctcagggaaactcatggggttcttagagagccccaagcaagacggcagccaacccttctgaggtactcattccatgttggcacagttgtgagcatcttcaacaccctagctctcacatgcttcccaacagttgggcctggtaaatggcagttcaggatatgagcatgagcattcggctcctgagactctgaaagagtttccagtaggtttgcctgccagtagactgttgcagaaggcactagtcctcagccatgcagagtgaaaaggcttacttcagtgggctgtcgtgaagtcctcagtgtctgtccagctgatgggggttacattttctccattcagtaaatctgtgaggcagcccatgggactctacgtgggagctagccaccatagctgtgtgttccctggctttccactctccctgcccaagcaccagctgtatggtgtttaggtgccagaagaggccacacaggcagctgaggcttttgtttcttctctaaatctggatgtcctgattaagagaggttttttttttgtttgttttttgtttttcttttaattgacttttttattttcaaatagaaatgaattacacaataattctgcttgtcttatgccagcccctggagggcttttagatggatcatctcctctgactttgactgcattataccagaaagtaaccaccaggtatctaagggggaggtctcggttctacatcagaacctgggtaagagtggaggtgtgacagtgtgcactgtgatcgcagcactggaaacagaacagtggaggcttggacatttttttttcaaaacctattttagtaaaggttcttaaatgtttcaacttcccctctagcccaccaaccaaaggtaggggagaagaaaggttactaggaaatgggagatgtggacctgtttagaagtagttcttttgggtgattccaaacattaatcagtagcagctgttcagtccagaagaaaccacaaggctctgtcgaatcagcacaagtcctctagagtgtcaggaagcagctggaataccatgagaagttctttggttcttttctctctatgaagtcatgacaagtaaaggtcagaaggtcagctaagacctgcaaactgttacaaggtgaactgatgcaaaaatctgttgggctctttccaaacatcacagtgtcctcttgtgtgtctgcttcaacgaaacatactctcataagacagcttccagaaaaaaatatcacatgacacaactgagtttccaaataaaccgggaatttccacttcagaaaggctcctgttagccagccttgtgtgaacaaacagagtcaagggaggcatagaaaagaaagggactgctatcacccctgggtaaggaggtcacagcacagagaggctaagtgtgactcacacccacagctaggacatgggaatcagccctgtcttagtttgcttctctgctactgggataaactctatgaccaaaagcagtttggagagaacacagtttgtttcagtttacacttccaggtaacaatttatgactgagggacctcaaggcaggaactgagccagagaccacagaggaacgctggtaccgccttgcatccaggttcatattcagcttgctttcttataccactcaggactaccttctctggggtggcaccattcacagtgggcatcaatcaaatcaaggacatgccacacactcccacagcccactttgggggaggcaattcctcaactgagactttctcatctcaagggactctaggtttgtatgactgacatggagcaaggctgatatctcagcaagcatagctctttccctgtggctgctgttgctgccagaaaggctttgcttagccttgctcaatggtgtgttggcacctcggtccctttatgttttcatattttgtgaccattgcaggggtggaccactgtgcacagcaggaccatggctgtgagcagctgtgcctgaacacagaggagtcctttgtctgccagtgctcagaaggcttccttattaatgatgacctcaagacctgctccagtgagttcccctttcacctctctatgggaagggttcccaacagaagtgcttgtatagacaatgcagagaacagcatgttctcctctgcccttttttctcccccagggagactaaggggaaatcttctgggggccgcatgctttcaatggcaataaataaacagttacttgattcccatcatagccatgaaggcttgctgagacaggctcagggacctcacttggctttggtctttcaggggcagattactgcttgctgagcaaccatggttgtgaatactcctgcgtcaacacagacaaatcctttgcctgccaatgtcctgagggtcatgtgctccgaagcgatgggaagacctgtgcaagtgagtttcattacacttaagatcctgggacagacaggctcagcacaagccctcacgggtgccagtgagttgatgacactggcatgtacctgtgcatcctccttcagacttcactgggcccctggtgatgtgtgtgcctatatcttgaagccactggtgttcctgcccaaaactccttcccacgctcctggaaatggctctgctatctccatgccctgccttgttagcattaagaaacagtccctcatttttggtgtgctgcagtggtttgagttgtggtttgttcaaagttatgttcaaatttagttgctattatgatacgtttgaaacatggcagttttccaaggtgattgtgttggtgggaagggttaactctcgtgggagttggctgattacagagaatgagcaattatagtgtgggatcaatccctctgtccccacctcttgtacataagtcctcactgtgctttcctacagtgagatgaagcaggatgaagtcctaacttcttatgcttctattcttccttgtcactctatccatgtgctgtgatagaactccagagcacagactaagacatactctcagctctacccctagccagtcaaacctgggacccacaatacagagacttgctgactgcaagctggctgcatgccaggtgcttagcactgtgctaagcccatgctatcacactccaaggacagatggattggctgcagctcagactcagggaagagtccaagatggctcttgtcttagtcagggtttctattcctgaacaaacatcatgaccaagaagcaagttggggaggaaagggcttattcggcttacacttccatactgctcttcatcaccaaggaagtcaggactggaactcaagcaggtctggaagcaggagctgatgcagaggccatggagggatgctctttactggcttgcctccactggcttgctcagcctgctctcttatagaacccaagactaccagcccagggatggtcccacccacaagggccctttcccccttgaccattaattgagaaaatgccttgcagcgggatctcatggaggcatttccccaactgaagctcctttctctgtaataactccagcctgtgtcaagttgacacaaaactagccagtacagccctctactaagtagggtctcagtctgtgtgggagctcagttagctctgaaaggcagatgtctgagaaaacttttgccttccctgagccctgtcaccttagcacaaggccagattggcagtgatattatccaggtatctagctttacttgtagctggctttaactcctttctccatttaaacaaacaacctaacgataaaattccaggctgcatcacttcttggccttttggctaagatcaagtgtaaaattccaggatgtttcactgggcagtggtgataaatgctttaatcccagcatcaggaggcagaggcaggaggatctccatgagtttgaggccagcctggtctacagagccagttccaggacggccagggcaacgcaaataaactttgtcatgaaaagccaaaaaacaaaacagaaacaaaaacaaacaaacaaaaccattctctcatcttccactaaagaatgctgtgctttctgcccaatgctactatttccacatagaacaaaatgaagaactaagaaccgtctgagagaaagggtaaaaatggaagcaaagacgatactttgctttccctggctcctgcctttctcattatcagaccgagttccttggccagtggcacaactgaagatgcagcagtcatcctccccctgcctgtgttgtcagttcatgttgacagctgccctgccatccctgtgcttcctgtgagaaacacttgccctctttggaatggattcttggaccttggcaagtgggctatccatgttgctgcttgcttgtcgatctctgcccagctgcctcacagactgctgctgcagccaattctaatagggcccgggcactgggggtgtggaaaaagggtgggtatgttaaataccatctatacttgcctgccttctaaagccggatgtgagggggttatgggttttttccctcatttgttttccttgctctgataagcaagagccgagggtgagatgctcgcaggactgcttggtcctcccgccctcgcctaaccaggcttttgctttcactgtccttaaaccttgcctgttttcacagttaaagtgtgtttgtaactaagggaatggtgtcattgtctatgtgagtttaagcccaacaagggtctaaataaagagccaacatcaaatacaagtgagctttatgtctggttgggcggtactgagaacctgtgaggtaacctgatgggttaccacatacctcagaactcacggggcagaagcattttacccggcagagccgttcccctaattgaagactttctgtctgctctcaagtgattcagtgcagctgctccatcctgtaatcaaagcctgagttttcactgtagtcacagctaatggggtgaggatgactgtaccccagccccatgccagatggtacagagccagataacatgactgtaccattttagtaaagtctggtggactttactaaagtaagcccaggtctgccagaccttgctcaacacacaaggggttcctcagcctttatttagactgttgacaacaaatggtcagaagagcctatcactcattctggaaggtgctgaagtatagaactaagtccaagttcctgggtcaaagcaggtactgactggcatgacgcctaccctctcttcctctcagtcctctgatgccagattctagctatacagtttgggagtgagctggggtgggggtgggggtgggggaataaggaggtttcttctcccagccacagctcaggggcctctttccctcactagaatgcctttcccttaaatgcaacttgcacaaatcagcaccgtgccaaacaagactccacaggcacagtacaaatggagtgctcagcccgcagtcttcaagaccttgggagttgagtcagagtcagaggccaggtcttacctggtgttcccagggcccagtctagcaaagtgagatgaatgggttagcagtgaacagagaccatctaggtctcctttaactccactccaccctgtcacctgtaatgaatccctattgcctcccgggggtggggggggatcactaacaatccttgactagcagtgtgggagagcccctgttccacctatgcttcagctagcccctcccacctatgcttcagctagcccctcccacctatgcttcagctagcccctcccacctatgcttcagctagcccctcccaccttgcgtacagaaacccagtctatcaccagagtcagccccatgtacagaaacatatattcagagacatgttttaaaatgtgtagtggaccttaaaccatatggctcccctgttagttaaggtctcactcctcagctttagcctgttgttcaccaagagacccaaagagacccctgtattgctgtctggagacctctcgctcagggacaggcccgggcacactctccttgcaggccagagagagataccctcctccagaagttagcaagctcaggattcacacactgtcctgagagaagcccttctttccagctgtggaggacactgcttgtacaggagccagagccttgaagcttctgggatccaactggccatactcccagtccatctatcacaggctaacatgaaaaacctcttcagcctcaatggcctgcccctgtcccaccccaagcctagttgtctaagtctgctctgaaagccatggcaaaataccacagactgcatattgttttctaaccacagaaatgtctttctcatagtactagaggctagatgtctgaatgcagggcgctagcatggtaatgctctggtgaaggctttcccccaccaatggcgtgtccactcatgaaggaagagagatggagagacagggagtgaatgaatgagctctttggtgtctttttaaataaaaacactagtcctggactgtcaagatgactcagtaaagtgcctgcctcggcagcctggtgagctgtttaagcctgagagtgcacataaagataggagagaactgactccagaaagttgttctctgacctctagattgcacgatagcacatcagctccccatcacatcatatacccttgatgatgatgatgatgatgaagaggaggaggaggatagtgacggtgatagtggtgatggtaataatgatgatgatgatgatggtggtggtggtggtaatggtggtgatggtgatgactagagtggtgatatatggatgcttcttagtttaagaaaaagcttctacaggggcaccaacaggtcagctgcccccactgaaaccatcatgccagctgttgaccttggtcaggcaccttcttggcaaactacccctatgaccatctcctcctaaggtcagttgcatttcaattacattgtatgtggagttcaaaaccagaccagagtcactatctgtcattgttgacagtctgactacactggacacactaccccacaattcctgaaactcccaccccacacacaccgcctggtttataacttagatgtgggaagcacagtttgtgtcaatatacatgtacctcaacaacctagctatgcggctcagccttgagtcatcctggtcacagagggcagagcctgttcacagtgaggccttagttaaatgaaggggaaggcatgtctttgagtgggagatgtttttgtcctgcttcctgggacttcttaaagcttctaccctgttctgctttagcattgattggtaactgagtctggttcatcttcttgtctgggcagagtcttaatatctgcttcagcacatgttccttggcccatctcctctcccgtgtctgcctgtagtgcacgaggtgctggtggtccctgggactgacctaattcagtttcttccccagcagtggttagggttcctctggaagaagtacttaagatgtgtcagtcagtctgcatggtagccaccgggatgtgggcagaacggccacaagagcatggagtagggagtcccaggtctcaggaaagatgttaaatttgatgctagacactcaatcaggggagccagccacaggtacaacccacgagcttccctgacacaggtggacagcagcagtgcaggtgcatggtccagatgggccagagggaggtcaatgccagagggagtcacaggagcaggtgggacctgtcacctgtagcacagggtgacaggaaactttctggagcttaccttgagccaactattaatttgtcttccaagaatcttaccagactggctagccccatagagttgggagggaaacacagaggggatgaatctgtgaactactgggttcagtacagctaagacaagtcacctcttcagtttaaggagccttgagacagtcacttctgctcactggccatcagtttcctcatctctaaagtggggttggaccagcatacttccaaggcctgttttagcctctaaatatggatagaagtgggcataggtcattgttccacaaatgcttgctaaacaagtacagtcctgcctggagtgtacactatttctgcaggccggtggcaagttagagatggtgacttaaaggacacactcaagtacattcccatagcagagtatcatcggccctgagagaagctgaggccaagatgccttccagagtgggtgggcaggtaggactagcctccctgagcaggaaatgagttcagagcacacttagcattctgtctcttatggcatatggtccttggaattcctgtgacctcacacaccctctgcatgcagaaagtgggcagtgtgagaagtgagaagtgttctataaggctaccttagaggaaaggtggggagcccgggagtggggagccctgcagtaataaagtccacatcataggatctggtggacattctcaatgaaaattctaggtagagagtgttgggagtcacgggacctttgaaacctcaaatcttagcaccagtgatacacttcctctaacaagaccatacattccaatccttctaatcctttcaaatggtatcactccttgatcactaagctttcatatataagagcctatgaggaatattctttttcaaactaccagattccacttcctggcccccataggcctatagccatgtcatagtacaaaactgtttcatgtagttttaaatttgctactgcctttgcccaggatcagccaagctaccagcccctcctgtcttcccttttgctttgcccacctttggttccaggaggtaatcatgctaccagctctttctcagcttccctgaatcctcggataaaagacacagacacagtttgttactttacaatttgccttcttggaacagatatctccctcctggaaaagcatgtccttatcaatttattatctctgtctctccacctgccctaaacttaatggctagtcccatctggcccctgtcaaacatccttggccacccacctgtagtggaggccacaagccccagctttccccaagacctcacatgattgctacattcttctttctccaaagcatggcagaaagccctctctctttcctgtgcctcctttttcctcaaagtaccacctataccttcaacccagctttcttttttttttctcttttttttactgtacattttttaaaaatttgttccaaatcatttgttttctacaaaatcatgcaactctctttttttaacagttttttattttatttatttttttattagatattttcttcatttacatttcaaatgctatcccaaaagtcccctatgccctcccccgaccctgctccccaacccacccactcccgattcctggccctagcattctcctgtactggggcatatgatcttcacaagaccaacggcttctcctcccattgatggcctactaggtaaaactctgctacatagtcaactagaaacacaagctctgaggggtactgtttagttcagatttcaacccagctttctttactggccaatcaagaaccacttggggaacaagacctttctattagaaactctccttacataaaatgcattcaggccaacttcaaaagtttccatcgtctatcacagtttcaaaactgtttaaaagtccaatgttcaaaatctcttctgagactcaaggcactctcttaagagttacagttggggggagggtataggggactttcgtgatagcatttgaaatgtaaatgaagaaaatatctaataaaaattttgtttaaaattaaaaaagaaaattaatgtggtacataattttgagaaataccatatctatggaaaatatacaattaaaggaaaattttaaatgtggaaaaatataaaatcaaaataagaaacagatcacatactttgagcatccaatgacatggggtgtacattagcattccagaagtaaggaaagggagcatggcgaggcaatactggaccaatgcaagactgaaaaccagctgggcaagctcctctgcacccccatgtctaacagctaggatccccaacttctttcatgtttctctgtcttggcctggatccacatctcatctgcagcttttcttgacaggtatctcacaattccagcatctccaacatactggagtttccagcacagtccagcttcacacaatgacatctctgggcctcgtgcagggacttttcttttgctgagaagggagtgtccacaacccctttcatgtatccttgccactatagcagaatcttgtaactaaagctgctaattctgctgcttgctagagctgggcctcaccccctccttcagttacatttgcatcacctttctgctgttggcagcttccatcacacagaagccttccttcattactattcaaaaattgggagtgtagcgcatagggtcttgccctgaggtcaccactctcatttagcatcaggctcttctttaaactttttatctcgttgtgcagtgaactccattatactttttggtgctccttttatcctcaagctgtacattttgcatttttctctgcctagcttactctttttcacatagatctgcataaaagtggttactaacaactacatgacacagtcaatactagcctgtcttgaaatctctgctgacaccataacaaaactcttcaatttagcctcagatagatttttaggatgagggcaaaaagcagccacactccttaccacaatatcacaagaatgtctctaacccacttactactcttcttttcgtcaaacccagctgtcataatctacactgctcccagcaccaccattagttaggcccctgccaaaacattcaactgctttcctaattcagagtcctaaagtctacattctgccatcaagcagtggtcaggctgcttacagtaattactctgacgactgttttagtcacttttctattgctatgaagggacaacatgaccaaggcagctcttataaaagaaagcatttaattggggtctggcttacactttcaaagttttaatcctttgttatcatcacagcagagaacatgacagcatgcacataggtgctggaacagtagctgagagtgacacactgacacactgacccagagatagaaagaaaaagagacagatagacagagacagacagacagactgactgactgactctggccttaccttggacttttgaatcctcaaaacacacctccaagtgacacacttcctccaacaaagccatacctcctatgtttcgaacaacaccactcctggtatctaagcattcaaatctgtaagcctgtaggggacattctttttcaaatcaccacaattacatagggaagttcctatacataaagatatgtaaagctgtgtaatgttccattgcatttggtcagtcccgtttctggacactttggttgactctcacttttcacctctacaaacagtaatgtagtcagtaacttgaaagcacatccctttacatagtgcaagggtatctgcagaagggaatccctacatgaagttgctgagtgcattctgtaactttcatagacatgtgtgccctttagtacagttgactttggaagctgtatgtgttttccctttagcagtcatctgtagacgtctcctatgactgactgagcatcacccatcctgttctggatcagataccctgaagggatgaaaagaaaagcttataaactcttacttactttaaagcatgtacattgtaacagttccaagagaactgaggagctgggctggaggctgccgccatatagccaagtataagaacacgagcctatgggcacagggcttctccctggctgtcctgacctctgataaagaaaagcagtgccatctgacagacatgggcttgggaaacttgagctcagtcgcctgtatctccattgaggaaaaccctgtagtcttcaagactacaggactgggtttaggaagtcccaggcagaagagtgtgatcagaaagtccactttggattagggcttggtgatattggcctgagcacttttgctattttattaccttggaaaatggagtattcttataaatgcatgaaaaaggaaatttcccctctgtgccaacaagctgtctgtgctgtgtgccacttagtggtacttttaactctgtgaggaactacccagccacagggaattattctgcattaataatgagtccagaatgtgtccagagaagtgagtcacacccagagcaaaccggagcaccaacctctgcttagaatctcctctgcagttaaatgtccagcctacatcatttccccattgctcaaacattctggcagtgttcctgcccaaagaaaggcaaaattccctttgtgtctgaaagcttagcagatggtgatgctgtgtagttgggaaaagttatggaattcattatcaaaaaatttttaatctggttcctccatttattagcaagtggtcttggcgagctgtaataagccttcctcgactttaatttctcttgctagtaaatgagaataatattggatcccttaactagcctacaggatatatttctgaggacttcccttgtctaaaaaatgttgcaatgatgcttaacaaaaacaaagttgatgggttcttcctgttgtaacccctgccaagccccttttccactttggtgcacacccactgttgaaatcctgttcactgtctaaaaggcttagttagctttcagttaactgtatggttctcataaactcttactgttccccgatggagctgaagagataactcaacagttaagaacactggctgctctttcaggggtcctgagttcaattcccagaaaccacatggtgactcacaaccatctgtaatgaggtctgatgccctcttctgacatgcaggttacatgcagcagagagcactcgaaaataaaacaaacaaacaaataaaatgcagcagagcactcatgcactaaattaattaattaattaattaattaattaattatttaaaatgtcactgccacccagccctataaaataatatgctacattcaggagctcagtgtggtgatctcagagttatctctgactcttgtcctaaccatgtgacggtggactcttcatttcaagtgttggaaaggacagaagttgacacaaaattgtccttcagatgaactttactaggagagatcttcatgatcatgagcagctgcgatcaggccgtgacatgggagaccagtagcaggcacagccacaccagagtaaagaagctagtgagaaagagtcctggattctaaagaacgaaggccatccggatccggcgttgtcagtggaggtggccagatccataccatgtgatctgcctggcactgactgaagtgtcttcaagggttgtctgtggtctaggcttgctcacagctgcaagagggaagagagaactcccaggaagacaggcttcagggaggtgcggcctgatttctggaagggggagaaagacagctagaagatctgtgctctaacatcaatctaccggcaaatcttataggctctaccatcggaacataggcagtctgaccacatgatccactgtgttctgggccagcaggatcactgcagtaggctatatctgtttcctgtgttccttccctgcattcacagctttctgtgctttcacaacacagccaggctaggggattctcctgctcaaaacattctatgactgcccttctccctcagacatgtcctgcctatgtgccctcatgttgtgtcctgcctacccccaccctgctgggctctttgcctttcctgaaacatggcgaacatgttcttggcatcttcatcgtgcatctagtcatccttctcatccagacacttcctcagacaccagcactactcacctcctctccatctccagggctctgctccttagcagacactataaggtgtcaaactccaacccacttggcccctttgaccatatatatatatatatatatatatatatatatatatatatatatatatggttatatatatattggttgttctgtccttagtgtctagtcaatgtctggcccacagcaagaactcacaacacatttgctgattatctaggtgtgttgaagcttaccttagtgctcaggctaaagcgtaagatcatgagttcaaggccaacctgggctacatggtggtagcctaacttgaaaaaaaacaacaaaaagctttgctgcctttgaataaacgaatgaataggtcaagtgttctacgtgcatatgtagatccacaggaaagttggtgttagacttattctcttttagtcttagctatttacatctccctttggaaactgtctttttctgttttctttccccctggagctgtatgttttgctttatgtatgtcctttttatatattaggaaatttttgctcatagacactttctatcctgaaatgaactctgtgagaaaagacaccgttttcatttaagatgtctggaatgtcttttagaaatgaataggtcaccattcatttatctatgaataattttcttccatttttgtaattctaaccagaactggactcttgtgctttgggggaccatggttgtgaacattcatgtgtaagcagtgaagactctttcgtgtgtcagtgctttgaggggtacattcttcgtgacgatgggaagacctgcagaagtaagtttactagagctaattcatacagccatgcctaattcacactgcaggcttaatgtgagccaactactctcaacagctaataccacacaatcaaatgtcatgcagggtccttggtgggatcctgaaacagaagaggggtgctatgtaataatgaagtaactacgtataattataggttttactaaataataatttgtcaagccaggtgtagtggtacttgctttgcttcccattactcaggacacagaggtaggtggatctctgtgcattcaagccctgtctggtctacacagcaagttctaggcttccttacatagtgacaccctctctcaatgacagcaacacactaagctaggcctggtgagctggtggtgtactcctatcctcctagctacttagagtgctggagagatggcttagtgattaagaatacttgggtccttccagaggatatgaattcagttcctagcatccatatcaggcagcttacaggctcctgtaactccagctccaggggatctgaccccctctcctggcttttgcaggcaactacatgcatgtacacatatccatacacagacacgtaagtaaaaatataagtaaataaatggactaaggatgtagcttcgtggttagagcacttgccaagcatacataaggctctgggttctgtccctaaaactccaacgacaacaataacaatcaaagcgcagtgtgcacgactgggcgaatggatctttgtcagtcctcttctctgacttctcaaaactcttcccaaagagctgtgaaggaaagatgagtacctggagtcgttactctcatttcagacgggaaagctaagtttctaagaggtttcgtgattttcctaaatagtagattatgccactgacaaaggtaagatcagctcccagtgctagcaatttaaaaccaagctttcccctatgtaaccttaccaacaacaccttctcgtgacaccagaagctatgcctgcagaccgctggggctggattgcatcctgagacactgaagttggtgctggagagtggaggtggctatggcagtgggaatgtttgaagacggaagtcaatccagagccaccagacttcatccagcttcaccttcctactcaaggagcagtccagagcccaagatgaatggatcttccagggggagtccacgtagactttttgttgatgcagttgttttaatcaccgtactctcctcagggaaagatgtctgccaggatgttaaccatggatgtgagcacctttgtgtgaacagtggcgaatcatacgtctgcaagtgtctggaggggttcaggctggctgaggatgggaagcgctgcaggagtaagtagctcaaggtctgcatatggaactgggcacagctcttcactggatcctcacattctacctctgtagaattcgtaaccacgttacaaactcacatcccacctgtgggtgctctgaaggtgtttccaagggatcaagtgagctgactctgggctcttcaggaatttctcagtggcagtcctaagttgtcaggcttctgttctgtttcctcccagcacttgcatggtggttgggtagctgtacagggcctaatttagtgcctagcaagctgatgggaaaatctagaatcattggtagcaattgactaccagggccaaaaagataatttcagctctttttcttcttggcagaccatatatgtaaggtaggagaagggccggagggaggttctgtggggttttgagaggggaaagaaacccaaactaacaacaaaagaagacttaccatttgcttccctagaccaggtttctcaagcagagtttcattagaaagctccggagggatctcagagatggctcagttggtaaagagcttgctgtgtaggcatgaggacccaaggtccatccccagtgctgtgtaaaagaaagcatggtagagtacacctatcacctcagtgtggggaggcaaataccagagaatcccagacacttgctggccagccaatttagttgatttggtgagctacagcctcagagagagaccttgtctcaaaaaataaagtggatagtgactgaggaagacattgacttctgacccccacaagcacaaacatgagtgcccacagatagtcacatatacgcatgctaggattctccagaaaagtggataacagcgtttatgtggcagaggaacacgtacatacatgttgtagataaaggaagaaagggggagaaaagaaagagaaattgactttaaggaattggctcatgaaattgtgagggctcgtgaggaggacgtctctttgcctgctctgaaggccttcatgtgactagatgaggcccacacacacttgggaaggcagtcggctttactcagaatctgctgatttaaatgttagcctcacgtacaaggtacagaaacttctagacctgtgcttgacaaaaaaacaaaaacaaaaacaaaaacaaaaacaaaaaaacaacccaaaaagcgggcaccatcaccagttaaagtttacataaaattagcagttatgctactcaagaaagagcagctcagtcaagtggggatttgaatataggtatagactttcttccctttctagatgatagttctctttaaggggtgggggttgataatatctatatggttttctgactctactgtagtggatagaatggtcctttcttggttaaacacagcaagttcattttgttttgaggttgctttgtggcagtttcctcacagactccttgagagcatggggcattgcacatgtcagcaaagctgagtagagaactattggcaccattcttctctgggagcagggcttgtgtctagagagaggctctgatgtgaatgagtgcattggggccctggctggcctctgccagccttcctgcaccatctgaccttctagctgaacactgcagtccttctttcatagagctcatgctttggtcctgtccacatgtctggatgagccaatttttctattcatttaacatatttatcagtcaataccttgaacaggtggatacgaggcaatatttctagccttacaattttatccctaaattaaatcccacagtttccaccttcctagtggtatctctagttacagattataatttcatgtaaggtttctccttttaaagggtagacagaggctcaggggtgtcatacaatcagaaagtgaagactcagggaaatgtgccccaactgggcaatcctctggccagacaaccttgtacaactcagtcagatacatggcatccatagctttatttattctctgtatgtacctagccacgccccaagggtgttgttaggattaaagggtcattaactacttcaaaaagctcaaattacctaacccatgagaaatgctcattatacaaccagcatggggtatctgggatcgctactaagaaatatgaagctaacacctatatagccattctaaaatcaaatggcaaatccaccaggtccagtagggtcaaaagagctctgacgggaactgccccttgacctcagcctattttggcacagactgcaaaggcaatcattttagcaatgatatgtctttaagatggatcacttccttaccatatcctgacgtgactgctcttgatagcttctttctacaataatgggttgttcatctccccacattttccctagggaagaatgtctgcaagtcaacccagcatggctgtgagcacatgtgtgtgaacaatgggaactcctatctgtgcaggtgctcagagggctttgtcctagctgaggatggaaagcactgcaagagtaagtgaccaaaactggctcgctgcttccatttagttttggagcaatggctttttggagcattttcaggcaatagactccttagctctccttctgccatagatgtatatgcggacagcaacaacagccgccagaacacctttgatttagtagatagtaaatagactgtttctgttctgtatgcaaagagtatatagaggatagcagcttgtgaattactccagtacccctgaaatatgctggagagacacatgcatggcatctgagtcttttctgatttcctttctatgatgaatcaatagattgagtaatgaagacaagcatttaatgaagaaagagaaaccctggggctggagagttagctcagtgcttaagaacactatctgttctttcaaagaacctgggttcaattcccaacatccatatggtacctcacagctatctgtgggtccagttccagaagatctgagacatatacaagcaggcagaacgctcatacacataaaacaaaataaaatttaaaaagagagaactcaacccctaactatccccctacacacacacacacacacacacacacacacacacacgcactcacattagcattttctgctggccaggcatagaagtaattttgcatatatatgcctttacttgctctattttttactttactttgaaaggttagacagctgcttgatctatataaaaagagaatattataataacatactgtagactgtttgaaataagatcatccatttggaattggtacaattctcttatgcagccctacatacaaagtctcttagcatctaaattgcctatgtatttatataaagtttgtctttttactgttaaccatctaagttttccaaaaatctctttttaaagttacattctttaagtcttaataggtcagtagagtactgacctagtaagtactactagtagtactgtgctaccaaatagatactactaggttcttttattctatcagaattaatatacataatacctattgtgtgtcaaacattatgggcctcaaaataaaagatacttagtatgtattgaaggagaatttagactaagaaagacacattgtttttgattgttctgttttgttaagattttatttatttactttatatatatgatgagtacactgtagctgtcttcagacacaccagaagagggcatcagattccattacagatggttgtgagccaccatgtggttgctgggaattgaactcaggacctctggaagaacagtcagtgctcttaaccactgaggcatatctccagcccaacacattgttaaataattatctcaccgcatgggtacagcatagggtacattggatttaagcaaaatggcatttgacactttgtgttagtcattatcataatcctgctggtgtccactgacttgcacaaagcagatgctcaatacattgactttggttgaataaattaatgtgttaggatattcagagagtagctgacacagctgggttactgtgtaagcttcttgaaagaggaaatggctgaggagaaactaagcatatcttcttctgtcagtcaaaacattagcactcatgtatctgagcctccagcaataaagcaaaaggaactgccaaggtctagcctaatccagtggttctcaacctgtgggtcatgactcctgtaagggttgacagaaccttataatcacagcagtagcaacattacagttttgaatatagttttatggttgggggtcaacacaacctgaggaactgtattaaagggtcacgtcattaagaaggttgaggaccactggtctaatcctttactgtactctgtgcacagtaaaggtcttgctgccagtaatcagtgtgtgatttcctttacaacgtgtgtatactgtgtagcttatttagggaaattactggtgttagtaattgggaactcacaaatagaagagtatctgggaaaatggtaattgtgatatccccacctgcctatcctgtgtactagctgaagaacaaaaacccggctctctaagttcacctatgcctcctgctgaagtatgcttttttatcctttgtatacacatgttctctaactttttaaccatgtgacctttcctttcattcctataggatgcactgaaggcccaattgacctggtctttgtgattgatggatccaagagccttggagaagagaactttgagactgtgaagcactttgtcactggaatcatagattccttggcagtttcccccaaagctgctcgtgtggggctgctgcagtattccacacaggtccgaacagagtttaccctgaggggcttcagctcagccaaggaaatgaagaaagccgtgacccacatgaaatacatgggcaaaggctctatgactgggctggccctgaaacacatgtttgagagaagttttacccaagtagaaggggccaggcccccctccacgcaggtacccagagtagccatcgtgttcaccgacggacgggctcaggatgatgtctctgagtgggccagtaaagccaaggccaatggtaaaatgggatggaggtgtggtttatattactcaaagtttgggtcttttagattcacagctggtcttaatgattgagcaaccaataattgttggctaagccattaaaaatacaccttggcaatactgccacctacaggccataatgggaccctggtgataactaaataaaatggcctcacagcctgggtaatcggatttaccacctagtgtgtgaagttcagtagagataatcacctcagcaagtgttatttaactacaacatacaagtgttttaatgccctggtatgtttcctccagagtcacctgaagaatttttttaaagatggatttctggtggcaactttactgacacttttaactttttttatttttattttcacatgcattggtgttttgcctacatgtgtgtctctatgagggtgtgaggtcccctagaaatgaagttaggcacagcttttatctaccatatgggtgtgggaattgaacccagatcttctggaagagcagcacctaaccactaaaacatcacccggaaccaagactctttaaaaaaaaaatggagaagaggaggaagagggagggagggattggggagtaagggggaagaaggggatggggtgggggaagagagannnnnnnnnnnnnnnnnnnnttcacgctgacctgaaacactcgatgtagcacagaacagcttcaaactcattgcctcagcctccctagtacttgaactacaagcatgaatagatttttgatcaagtctttaagtgaatattctgaagtcatgaagtctttggatagagacctatgttggcagaaacctggcttttgaaaagaacaaagttgaatgggtccaagttcctattgctccgcaaagctcaactctttctctggggttttcctgactttgtgtattctacagggagggtctgaaggatgactttatttgcatagatgtggaagagtgtggcctttgattcatgagaggccaaaagccaggatgggtgttggagctagttcatgatgattatatatggatttcatctggtgcgatgagaagactcaaggtcgtaaagcagcctgcttccaagccaacctccttcaagtactgaaggcgcattgctaagaagaagaatgcacgcagtcccatgggagattctctagaatctgtgcctaaatgggcccagatgtagatgactgacagttgctcagtctataaaaaacaggagtactcttggatctattagcaaactccatcctccctcacaaaattgctgatggtttccaaaccatttttttttaatgaaagagtccattttataggcttttcttacctcagtgttcagtctttccctgaccaagagtgagggagcctttagagttgtctatccccaggatcgcctgatcttagtagtttataaaaccggttgttcactctagactagcttgctagagctcaagtataacccataagccctggtagactgcattcttaaaaagtactaggcaagagtcttttcctcccaaaacagtaattgtccttttattagattcattgaaactaacccaccttacatttccacattcaaattgcttcaaattgcccaacgacagctagtaaaagcagattatttagttcttgaatcagccaggcttatccaaaatgacatcctcttaatgaattcagtttctctgggcgaaactaaatatgaccttgaacaagcagtttccctcttgggaatgctcctttgaaatttcaggaagatattttaagtttcttctttatcctgactgggaattccagtggtctgcagactcacctctttatcttttcatttctgttcaagacaatgccccaccccacccatccattcaagaaaggtgggcagaaggcagctccatttggccccaagacagttaagatttttctcatttccttttgaggttagaccatccaagcactcaaaaggctgggtcagggggataacagcccaggtttcaggccagccttagctatatggtaagggcctattttgtttgtaaactaaataatgttataaattaacctgcttagaattttcccagaaaactccattttaccaagctgtgagacttttttcctaccgtccagaggccaattcaggagtacaacgaatatttgttacttgaaccccccttgagagctaatcaataaatctgtgccttagggctggtgagatggctcagtgggtaagagctcccgactgctcttccgaaggtccagagttcaaatcccagcaaccacatggtggctcacaaccatctgtaacaaaatctgactcccccttctggtgtgtctgaagacagctacagtgtacttacatataataataaatctttaaaaaaaaaaatctgtgccttagctatctacccccttctagacactgcatctctagaatcctcttttgttcataggtccacaataaaagtgttagaaactataaatgggttgttagtattgatgtttcaagtccacaacttaatacctaactgactttgggcacagcacaatgtacagatggtgggaatgcaatggtatcttactctcatttctgttgcttaggtatcactatgtatgccgttggggtaggaaaagccattgaggaagaactacaggagattgcctctgagcccattgacaagcatctcttctacgctgaagacttcagcacaatgggcgaaataagtgaaaagctgaaagaaggcatctgtgaaggtattatagaatgtgtctaaggtagaccttagttagccaaagggcagcatgaaccccagagaaaaacctcaaaccgtttcttcagtgcccagaaaaatgcctccctgctgaccaagtgatacctaaaaaggcactgcacccaaaaaaatgaagagggaagacaagtgtgatagctaccatgtcttgctgtgccaaatagcgtactaaacttttttttaagatatattttatgtatgagtgctctatctgcatgtactcctgtatgacagaatatacagatggttatgaatcaccatgtgcttgctagaaattgaactcaggacttctagaagaccagccagtactcttaaccactgaagcatctctccagcccccattctaaatgttttgatatactagtcttaattctcactaaaccctagagaagtttaagcaaggagccaccactaaagaaaccaaaaaataagtactacttcaggaaatttgtggggatacctgtccttgagggctcaccattgagcatttaaagggtgccttcctgcagggacatctacgtctagaatgactctcctttagatgttagacatttaatatacttttctccaggtcactagctgacctcgttatacttacacataatacccattttgccttttgggttcagacgcccttaaaatccaatttaaatgatgccttattcctctaaagcaaagaactctggagtgaagagaggacccaaggagaaagccttccagattcccaagggttgagcatgctttgccttgtggctttcattcctagtgaaatgtcttaggtaggtagggctgcagattatactgggtcttttagcaacttcaactttttttcagcatcaccttcttgacatggcatgggggcattctttagacttaagttctcttgtggagagaactgctctaacatagtcaaactgctttgtttgaatccttggtgttaccaaataacaccaaaagaccctgggtcctaaagagcatgtgtggaactatcactccctttggccatctctttccattcagctctagaagactctggtggaagacaggactcagcagcatgggacctgccacagcaggcccaccagccaacaggtgagtcttaaaaggcactatggtcacttgggtcttctgcctcagctcccctgtagacagaagttgtaaagtgacagttaagatttaaatgtcagctaggacccttttcctctgacagacaggaaagcttcactctgtcccttaggccatagtgggtagctactatctctgccaagtgtttttgtcaccgtatgtctcaaagcaaagctctacaacaaagctgagggctgcggaacaccgtgcctcagctggtggctgcttaagacagtcacgtgagacagacttgaatccacttctttctcttcacagaacctgagccagtcaccataaagatcaaagacctactttcctgttctaattttgcagtgcaacatagattcctgtttgaagaagacaatctttcacggtctacacaaaaacttttccattcaaccaaatcttcaggtaattccaagtgaacaatcactactagctaaggtgcagcagccttttagtttgctaacagacttagattttaaagtggggaagaggaaattaagtgcagtaactaaaaactaatgcaggagccattgtctcgacccccaagtacactgtctcttccgttgtttgaagccaaccaagcccttcaccagcatttacttccctgtatctggatccatggaaaaagacttctttatgggttcctgtgtactgataagtcccattattatgtctgggaagtgtggtaaagacaaaggcgaactcttttcatctgctttctcaggaaaccctttggaagaaagccaggaccaatgcaaatgtgaaaaccttatactgttccagaacgttgcaaatgaagaagtaagaaaattaacccagcgctatatccttttccagtaggatactgttgttgaaaatattttatctcaatcagtggtttttgccctgcttttgatcattcagttcctgggtaaaaaaaaaacactttcattattataagccttaatcagcactagagctaggcagatatccaccctctatgctaaattatttccccatcaataaccccaaatcataacttccatgttccatctaggctgctcttaattccaatcaggcagccttcgtagacatgtattcataactcaccctatggcagcttccccttctccttcctccttccatcagatcccaagccaggaaaataacctcttttctgcctagcttattggttgtaggcatccttctttgcccatcagggataattttggggaagggggacaaggttacataaggtcacttgggtacgatagataggctctcattcctgggccaaccagggcttgggggccaatatttagcattacaatacaagcaaaagaccaaacctcaatatattagcaaaacttttcaaataactgtgtagattgcattgacaaaggcatcaacactgaaccaggaaagtgtttttttttttnnnnnnnnnnnnnnnnnnnnnnnnnnnnnnnnnnnnnnnnnnnnnnnnnnnnnnnnnnnnnnnnnnnnnnnnnnnnnnnnnnnnnnnnnnnnnnaaggcatcaacactgatttttttttttttttttttttttttttttttttttcttcttcttcttctgtaagaggcagctagataggtgtttgagagttgaggtcaagccaagcttgaccattcaagcaagcacttagctgtcatctgctggctagtgtaggaagaataacagccaatctggcaacatgtaaagtgtaagggggagacacttaaacctctacattaggatggatatacacagctcttccgaaggtcctaagttcaaatcccagcacccacacggtggctcacaaccaccagtaatgggatctgatgccctcttctggtgtgtcagaagtcagctagtgtacttatgaataataataaatgaatctttgggccagagcaagcagggttgaccagaggtcctaaaaaattcaattcccaactacatgaaggctcacaaccatctgtacagctacagtgtactcaaatacataaaatatgtcttttaaaaaaaaaggatggatatacactagaaacaaagtacctcagataggcacagtacactataaaaggaagaagtttcaaactccatcaagcctttaaaccttcagccctaaaaccacacaatggccccacagatgtgcagattttaaggagctgggtgtgttcctttttgtttttggcagcagagatcctttatatcaattctcttaagagattgaagattctaccaagcaaactggatacaatgattcattctattgaacaaactgccagctgctctgaacttaaaattagagtaagcttactaaagccagctgatactcacctcagtgtcaactagtccatagggaaatggcttaattctgaactactcctgtgccaacaggcttacataagaacacacaattctccatgtaagggggtggtatgacactggtcctccatgtggactgtctttctgatggtagatacacagataaagctggactcactgtcatgggggcagatgatgaggattaagtggcttagagggaagacaagcattaactctgtagcctctttctgtccccttcccccactccctagcttttgactcccatgccagtcttctgacacacctcacaccttcccaactatgagtgtggcactggctagttagttataagcaacactggtttggataaagttttttttttgtctttttttatcataaggaaaagtaaattcaaattgaattatctgggtttgatattttgaaaataagccaactgggcgtggtggcgcacgcctttaatcccagcacttgggaggcagaggcggcaggtggatttctgagttggaggccaccctggtctacaaagtgagttccaggatagccagggctacacagagaaaccctgtctcgaagaaaaaaaaaaaaaaagaaagaaaaagaaaagcagcttaacatgaactactttttatagtcttaaaggcatgttagattactataaatgtacaagagttttaatatactggaaatttttgcaacttgttagttaaatcaaattgtacttgattgtaagttaaaacaggtattccagactccttttccttaatttgagatttactagaagaaatgactcaaagaatggaagctttggaaaatcgcctaaaatacagatgaagaccagaattgcttttatgtatatttgtacaccatcttaaaaaggattttgacaaaggtggtagagcctcccaccataagcagacctacaagctgtaaagcaaaatacaaccagtacaggagacactggattgcttgactgctggacagagaaaatggagacactgaggtgtctaaattcaatgagggtggggggaaggaatcctgaattctgagtttaccatgagaataaataagctgcgcagtgtagtgttccacggtgtactgtggacataatttccttctactgcaacactgaaatttcattttcggcagaaaactgactccacaaattgctattttttgtactggaatttaccttgatgtgtatatggacatgtgcataagtcacagagacatatgttctgtaataagttggatttctacacaatattaaaattcaccattccagaaaatagtgttgagtaaaattcctagtttaaatttgattaggggccatgctatttactagttgttaactcaggctgcctcaaactcccaattctcctgtttccaccttcagagtactgggaacacagacacatatggtaccaagcccaagcttagcttaagtataaactatgtatacatgagaaaagccaatataatcagaaaaaagcaggtttagcgtttgcatatattttttaagctcatcagctcagcagtcactgacttgactagtgatgttattaatgtggaaatagaggtccttgcatgctgctagggaaagtacaaactagcaggttctgaaaacagacttttaactatagcactgccatttgagatcaaaccgaatggtcttaacgtatacaagggagacctgcagagaaatgtcactagttaggaatagcctaaacatcagaactgattcaccgtgtggtctgtatcacagaaatactatatacttacataaatatccatggtgaagcccaaaactaaggtgggtttttgagacagggtttctgtgtgtagccctggctgtcctggaactcactctatagaccaggctagcctcgaactcagaaatccacctgcctctgcctcccaagtgctgggattaaaggtgtgcaccaccactgcctggctgggtttttttttttttttctttaaagtaggatttcaagcatccccagctggcctcaaactcactatgtaacatatggcctttttaaggtctcttgcttcacctaagtgttgaggattatagtcatgcaccaccataactaatttacctggtgctaaggattgaaccttggaattcatgtggatcaggaaagcactcgtaactgtgccacattccagccctcaaatcaatgacaatttgggaaacagggagctccttgagttcaaagccagcctgatctatatactgagaccctgacatctagcattctggtaattctatgaattaacatatacattgctatgcatggacatattaatttgcatatcaagtgcaagagataagtcaaagggaacttataccacttcaagaaagcactcagctgccaggcgtggtggctcacgcctttaatcccagccgggtctacagaatgagttccaggacagccagggctactcagagagaccctgtctccagacaaaaaaaaaaaaaaaatgcacttagctttacagaggacagacaagccgctgtattttaaattatgaacctttcatattcaaaatactataattaaatttatactgatacttaaagtgctttgaccagaatgttctcccaaaaggtgggtggaacaacatttaccaggcttcactccattgagtaatttttctagaggtcaacattgtgactcaaaataaatgttgctacaaagcattaatttggatgatacaaagattaaggtataagtcacagggcttcaagttggctactctttgttcaacctccctctagctgcataaaaccatccctaccactttttccttgatgccacatataacacacaagcccgcagccaatccccactattgattagggactagacagagtatctactgctgaactgaactgggttcccacaccaggcagctgtactctcaccagttaattccaggtacaagccatcaaatgcttcatcaggcatactcacatgcagacatggtaagtaaaaagcttaaggtttcttaaaaaaacagaaaaaactcacagggctggggaggtgacatggctcagcagctaagagcactggttgtgctcttccagaggacccgggtttaattcccaaacagccacatggcagctcacaactgtctgtaactccagttccaaggtatcacactaacatacatacaggcaaaacacaggcgcacataaaatctttcgaaaaaattatgcttgttcaggtgttatcagcatttttaaatttcattgttggcactaacctctttaagcctacatgtcacctgtaacaaacgtcacagtgctcttgtcataatattgagcacatacacatttagcaagtctcaaaacattttttatatacatctttttttaagtgaagcatggcttggcggataagtgcactgttatcaatcatctgtgactcggttcctgaggacccaagagcagcaactggccttttaagcactaggtatacacatggtgcacttaaacgcacataggcaaaacaaacacacacacacattactaaatctttgtgctggagggatggctctgcaattaggtgcacttgtttttgctgatgaaccaggatctagggaattcaatgccctctactggcctcaatgggaatcaggcatgcaagtggtacacagacaagcacaacacccatacatgcaaatcttcaacaaacactttaggcatacattcgaatgaatactgtatgcaagtgcccagagtctagaaaacagtgtacagcaaccctcaacaccttaaatgctcagtgttagctgtgacaattttattcttcaccaccagtctctcacaagatggggcctgggaggattatactgagtagatgaagaccactgtttgctttgactctgaaccagatggaatagcaagttaaatggtaagtggacacaatattgaaaactactattaacaagacaaaacgcttagccgggcgtggtggcgcacgcctttaatgccagcacttgggaggcagaggcaggcggatttctgagttcgaggctagcctggtctacgaagtgagttccaggacagccaggactacagagaaaccctgtctcgagaaaaaaacaaaagacaaaacgtaaagttccagactagacagtcataaatctaatggggagctgcttaaacactgggaaatatttactcaaatttatgtgacctaaagttgaaaacgctgaatccttacttttccatagttcagtaagaatcaaatgtgactaatgctatttaaacaacaaaaaatatcaactttaactaggttagactttcttcctatagcaagctcaacctgtgtctgccagtgttgcttgcagttaacatattctatactcacccagtagagctgtggattaaatccagctggctagaatcccctgcacgtttatggttttttgtttgttttgtgggttttttttttttttttttggtttttcgagacagggtttctctgtatagccctggctgtcctggaactcacttggtagaccaggctggtcttgaactcagaaacccaccttactctgcctcccaaggcatgcgccaccacggccggcttcccctgcacatttaaaatgccactttttacaacccctgatgtgggacagtgacctttcctccttagaaacagcagaatggtacttcttacagattctccatgaaacacagcagagtaagttgtgtctcctaccacatagcttttaaacgttcctttgcattttaaacccttcttgcaaacacaatgactacacaaaaatttaaaaaattatctcatattatcactacctacaaagctctaggaaaaaaaaattaaatgcttatagccaagtcacaacacaggaactctccatattttaaggaactaagtaggaaatagttaatttgaaaatagttctaaattattcaaaatagcatgcaaaatccacagctttggtccatcacaaatcatcccatgcctctcaaacatacccaaaaatacaatgcaaacaccctgagactagaaccccgagcctgtctttacaaggcgctagggataacagcttagaagctttctgtgcaagtttgaggactgaaactggaccaccagcacccatataaaataaacagtgggtgccagcctgcaattctatcacttagggtgtccagagaggctccccagaggaagttagctagactagctggcactgccaaactctaggttaagtgagagatcttacctcagtatataaaatagtgattaaaaacaccaaatgaccttctgattagatattattgtatcaccacaaatgtgcatttcaatattgaaaatatacactcaaacacttctctggtccacacattttgcatagtgatacagtgtacaatcttttaacaaaaccccagcaaaatgaaaaccaagcagtataacttctcacccaagtcttgcctgtggtttcaagaaagctaaatgttagaaagcaaacagacaccatgtttttcaaaaggagctctggcaaagttttattaaaggaaaactttcttgtttacttctcaccagtctgttctggcatgcttctaataatatcagaatcacctagaaaataaaataatagttttacaagtcatttaatggcaactaataattaaagaattcccctacttgttctttaggtaagaaggcagattagcactacgtgcaaattgtttcggctatcactcttaaaatcacttaaaaataccttaaaatctcagccatcctatacaaataatgaatcagatggtctgtcaccagcatttagataaccagactgaagtaaagaactaggtctggggacacatgcatggtcttactatagcgaatgtctagcctgtcctgattatcacagaatcagaacagcgagaatattcgcagtgttctacaaggcaactaaaatttctaagctcaaaataaaatagaatgcaggcatttaccacaaactatttatccccaagcaacaaagaggtggtaaaattttatctcgttcaccttctaccaaacttttcttcccaagggggggtatggtaagaggggttgagaggggtagagggacaaagagtttcactgtgctgccccagttgtcctagaacttgcattaaacaaaattcttaatatcaaagttgaaccaaagccactgtctaataagcacttacattagaaaaaaatataattttaaaaacatacctgggtcaatgatagccagtgtgcatactctgtagtattttccacacgctgtgcccagttcaatattattgccactgtagtgatggaccccagttttagccaacatggcatagtactctatttcagatttccttagggaacaacaaaaagtcaaataaaatgccataccaaggtactgacagacttgtgacaaattggtgaggcctttttaacagtaactaaatcacttccaactcttaaaaaagattctagctgtcctgattatcatggatcctttactagtgtattgtgataattaaatacctaactttttggaggtagtatccaatattaaagtacattgtattcatgtttcaatttactaagtttaaaatgtgtaagttacttaaaaactagaaaagggtataatagacataaaaaagccaatgctggcctggagatatggttcactgaaagcttgtactgctcttaagaaagttcagtttccagcattcacatcagccacctcacaacaccaggagaatctcgtgtcagcaacaagtatatactccattttaatcaaacgaaggcaaagaataataggaaggtggagtggagggtcagaaacctaaaaaagtaagccctcttaaaccacctactatacagtgaatactacataagggctgctgataatattacccaaaaaataaatacttcagtgccaagttaaaggatacaaattgttaagatttgaaagttccacagaaccttgagcttagaatgtggccccacataccaacagtgctccaaagtgcttatgagaaatgaacttgaagctccagcctggacccactgagtctgagcttgtaatttagtaatgaatgtctacgctgccactatgaatcgactggcaaaggtttaaaataagaccaaacattccaaactctgccactaagtatagacacctacataaaaggctgaagaggtgtacaattgccatagaaaaatcaaggagcgtatactacacaagcttcttcagcttacttaaaatacttgttaggttcgagttaaaatagttaatcaagaatgaacgtgttcagaaaattggaccctgccaaataggtgatttcatgataccatcacctccataatccagccagaatttttctaaactaaaacaggcacatgaagcggagtgttaacacttcaaaccttgaaaaattcgggatcgggcttcccccagtctgcgtgtatcatttgtatacctcctgtcacacaacgtgcctcaaaggtacatttacaaaaaacacacacaaagcaaggtccaaacatcagaaagcaaccatcattattcttcttcccaatgctggatactgcacagtgaatttacaataggctgcacacatccaggttccctccattacctcaaagctggacagttgttggcaaggataaccaacttcgctttgccttgtctgatcatcttcagagtctgcttgtagcccagcacgtacttcccacttttcataacaagttggagcctagagttgatcgactccagagactttttctacaatgcaaacgtttgagacttgaacaccacttgcagtcatctaaaaccaaactcagttccagatttctggaactgaaccctttcatgatgtctgagaccatacaaagagcctctcggattcactttgagaccctgaaacgtcagcgacaagtcgtccacccagtgtgctcaaatctatccgccccggcccgacccagctctccacgtgaaccggcttccgggcccgatcggcttcactcaccgtcttctttgcggccaccatcttcctgccttaggtgcgggacaacccccaacctagcatacacagaggacagaagagaggattataatccagagcgtcaaacaccagctagcggagctccccgagccgcctaatcgtttaccccgcagagctcactcaccaacaccagccgccaagatggccggggagcgagaaaggaaggagctcccacaatgcaaagctcttctaggccgacagaggattgtgggaccggaagcggaagagaagccggtccgggtcacaagcagaacagcgcttgcgagagtagtctgcggtagttggttgctatggggaccgggttacaacgcaggctgggctgctgcggcgtctgggctccggccttcggttctgggcgtttgttctgctgcagcgggctgacaccgcggagagccggagctcgatgggagctgacgacgaggcccagggctccgtggcgaggcggcagcgacctggcctctcctgggctggtctccgcctgacgttgtcttgggcgtgctccggaaggaccccgggccgccggtttaccccgtgactgctcaccaggagcggaggcatctctgtccacccgccgctgatcttcctgtttgccgctccgtaggacacacaccccttttgcggcggttttataccgtgtacttgggagcctactttgcacagggaccacaattgaaaaaaaaaaaaaaaaacctggtgaagtggctgacgggtaaatgcgcttgtcgctaagtagacgaatgagttccaaacccacgtggtgggaggggagcgccaagtccagcaggtttttctttggcctgcgcttgaatgctcacatacgtatacagaagtaaagaaatagtcgcaatacgaataatttaaaaaatcattttgctacgaaacttgggccgttgtataaatgtagcattcaaggaaaaaaaaaaaaaaccttgaaagcctctactatttacgcactagcaccaacgaaaacccagggctgttgagattgttcagtcagtaaagtgtgcttgccttgcaagcgtggggacctgcattttatgcctaaacctctctgtcaatccccagcccccaaaagtctggcatggttgtgcacacttgtaactccatttgtggaacagattccccaaggctggctagccagccaacctagtctaacctgtcagctccaggtctcaaagatcttgtgaaaaataaggtggacaactaccgagtaagtacccagaagttgacctgtgacctctgcccaactgcacaagcacctgtgccaccaaatttatataagcatgaaaaaggaaacccagggtagtaggtaagctgtatggtgagttactttgccctggaggttaggaaagggaagaacaaccctgcctccccttaattaaaataactttaaaaacatccatgagtcatgcgggtcgagatgatctatacctataatcccacccggagctggcaatctctgtgagttgatcttttggaaaaagaaaaaaaacggaaactaaaacatattacttagccaacacacacactctatgagatagtaactgtgttattctcacatttttacagctagtgtattacagaagtatgaatagaaccaggcctgcaaattagggttttttggtttttgtttgttttggttgagtcttttgagacaggatttctctgtctgtcctggaactcactctgtagaccaggctggcctcgaactcagaaaatccagaaattttacattaaaatttattcaactgttgtggcccattttaatgtgaatttgaccaaacggtagtgttcaattaccatactctttgctttaacatttaggcataaagtacttaggatggtacaaatccagctaattgtcttctattaatccagttttgtaaacatagtaaactttaaatgaactttaacaaatagctcatatgatttaaattcaaagcaataagcctagattggagttgtgacattgctgtttaacatgctacccttaccccacccacccccctttttttaatcctgtgctttgctgacctgtttgggattttttttttttttttttttttttttggtttggtttttcgagacagggtttctctgtatagccttggctgtcctggaactcactttgtagaccaggctggccttgaactcagaaatctgcctgcctctgccttctgagtactgggattaaaggcatgcgccaccacgcctggagattttttttttttttaaagattttgttttatttatatgagtacactgtagctgtcttcagacacaccagaagaggccatcagatcccattacagatggttgtgagccaccatttggttgctgggcattgaactcaggacctctggaagagaagtcagtgctcttaatcgctgaaccatctctccagccctctgctgacctgttttgtttgtgattgtcctctgattatgaaatggaatgtctgcttaagagcactgtgcaatacagttctcttcaggtgcagcttgggagtgttgagggcctcctgttcatactagacattcaagtatgaatcttctgcctgccttcccccactctcaaatatttctggtagacacttaaaatgaaccatactgtaccctcagaattaatgtcatactaagtaagatacagtgtaagtcttagtgctgtgtgaagaaattgttatggacattataagtattaattcgaaagggtgccatgtagcaggctctgggttttgctgctcctgtaaggtgctttcagaagtgctggtgatgtatctcacttggtagacgtttggctgtcgtgcacaaagtcctggatttaaccccagtaccaccaaaagctgggaataataatgcatggtgtgtaactccaacacttggaggtgggggtgagaggggagaagctagaatagaagctctagttctaggtcatcttccattacatatcaagttcaaggccctcctgagaccttgtcttcaaaaaacgaaaggattggtaaataaagactataatgtctgtttacagctgtgcagactttaatatacttttgctaaactttaacttatggtcatgttgtcatagaccatattaatcttttttttttttttttcggttttttgagacagggtttctctgtatagccctggctgtcctggaactcactttgtagaccaggctggcctcgaactcagaaatcctcctgcct

SEQ ID NO: 1163 - DNA, 3573 bp, Mus musculus
ctttcagggagcctcccaggcagccagcaagcgcggagagcgcactgggatgggacttgaaggcggcttctcaggacacggcgctggcgcgggattcttgttcgcgtccggggatcggtgcccaaggagctctgcggtcctctgcggggcgaggcggcggaccacggagactgacactcacagctgctcccctgtctctcttcccgggtgtcggcggcggtggctgcagctgcagccctgctcctcttgaagatggagaagatgttggtggggtgcttgctgatgcttgggcagctcttccttgtcctcccagttgacggcagagagcgtccccaagccaggttcccttccagaggccgtcatgtccggatgtatccgcagactgcactgctggagagttcctgtgagaataagcgggcagatctggtgttcatcattgacagctcccgaagtgtcaacacctatgactatgcaaaggtcaaggagttcattctggatatcctgcagttcttggacatcggtcctgatgttacccgagtaggtctgctccaatatggcagcacggtcaagaacgagttctccctgaagacctttaagaggaagtctgaggtggagagggctgtcaagagaatgaggcatctatccactggcaccatgacagggcttgccatccaatatgccctcaacattgccttctcagaagcagagggggccaggcccttgcgggaaaatgtgccacgcatcataatgattgtgactgatgggaggcctcaggactcggtggctgaggtagctgccaaggcccggaacacaggcatcctgatctttgccatcggtgtcggtcaggtggacctgaatacactaaaggccattgggagtgagccccacaaggaccatgtcttcctggtggccaatttcagccagattgagtccttgacctcagtgttccagaacaaactgtgcacagtccacatgtgcagcgtcttggaacacaactgtgcccacttctgcctcaacacacctggctcgtacatctgcaagtgcaagcaagggtacattctcagcacggatcagaagacttgcagaatccaggatttgtgtgccacagaggaccatggttgtgagcagctgtgcgtgaacatgctgggttcctttgtctgccagtgctacagtggctacaccttggccgaggacgggaagcgatgtacagctgtggactactgtgcctcagaaaatcatggatgtgaacacgagtgtgtaaatgctgaaagttcctacctgtgccggtgccacgagggatttgctcttaacagcgataagaaaacatgctcaaagattgactattgtgcctcttcaaatcacggatgtcagcatgagtgtgtcaatgcccagacgtctgctctctgccgctgcctgaaaggcttcatgctaaatccagacaggaaaacttgccgaaggatcaactactgtgcactgaacaaaccaggctgtgagcatgagtgtgtgaacacagaggagggtcactactgccgctgccgtcagggctacaatctggaccccaatggcaagacctgcagccgggtggaccactgtgcacagcaggaccatggctgtgagcagctgtgcctgaacacagaggagtcctttgtctgccagtgctcagaaggcttccttattaatgatgacctcaagacctgctccagggcagattactgcttgctgagcaaccatggttgtgaatactcctgcgtcaacacagacaaatcctttgcctgccaatgtcctgagggtcatgtgctccgaagcgatgggaagacctgtgcaaaactggactcttgtgctttgggggaccatggttgtgaacattcatgtgtaagcagtgaagactctttcgtgtgtcagtgctttgaggggtacattcttcgtgacgatgggaagacctgcagaaggaaagatgtctgccaggatgttaaccatggatgtgagcacctttgtgtgaacagtggcgaatcatacgtctgcaagtgtctggaggggttcaggctggctgaggatgggaagcgctgcaggaggaagaatgtctgcaagtcaacccagcatggctgtgagcacatgtgtgtgaacaatgggaactcctatctgtgcaggtgctcagagggctttgtcctagctgaggatggaaagcactgcaagagatgcactgaaggcccaattgacctggtctttgtgattgatggatccaagagccttggagaagagaactttgagactgtgaagcactttgtcactggaatcatagattccttggcagtttcccccaaagctgctcgtgtggggctgctgcagtattccacacaggtccgaacagagtttaccctgaggggcttcagctcagccaaggaaatgaagaaagccgtgacccacatgaaatacatgggcaaaggctctatgactgggctggccctgaaacacatgtttgagagaagttttacccaagtagaaggggccaggcccccctccacgcaggtacccagagtagccatcgtgttcaccgacggacgggctcaggatgatgtctctgagtgggccagtaaagccaaggccaatggtatcactatgtatgccgttggggtaggaaaagccattgaggaagaactacaggagattgcctctgagcccattgacaagcatctcttctacgctgaagacttcagcacaatgggcgaaataagtgaaaagctgaaagaaggcatctgtgaagctctagaagactctggtggaagacaggactcagcagcatgggacctgccacagcaggcccaccagccaacagaacctgagccagtcaccataaagatcaaagacctactttcctgttctaattttgcagtgcaacatagattcctgtttgaagaagacaatctttcacggtctacacaaaaacttttccattcaaccaaatcttcaggaaaccctttggaagaaagccaggaccaatgcaaatgtgaaaaccttatactgttccagaacgttgcaaatgaagaagtaagaaaattaacccagcgctataagaaatgactcaaagaatggaagctttggaaaatcgcctaaaatacagatgaagaccagaattgcttttatgtatatttgtacaccatcttaaaaaggattttgacaaaggtggtagagcctcccaccataagcagacctacaagctgtaaagcaaaatacaaccagtacaggagacactggattgcttgactgctggacagagaaaatggagacactgaggtgtctaaattcaatgagggtggggggaaggaatcctgaattctgagtttaccatgagaataaataagctgcgcagtgtagtgttccacggtgtactgtggacataatttccttctactgcaacactgaaatttcattttcggcagaaaactgactccacaaattgctattttttgtactggaatttaccttgatgtgtatatggacatgtgcataagtcacagagacatatgttctgtaataagttggatttctacacaatattaaaattcaccattccag

SEQ ID NO: 1164 - protein, 967 aa, Mus musculus
HSQLLPCLSSRVSAAVAAAAALLLLKMEKMLVGCLLMLGQLFLVLPVDGRERPQARFPSRGRHVRMYPQTALLESSCENKRADLVFIIDSSRSVNTYDYAKVKEFILDILQFLDIGPDVTRVGLLQYGSTVKNEFSLKTFKRKSEVERAVKRMRHLSTGTMTGLAIQYALNIAFSEAEGARPLRENVPRIIMIVTDGRPQDSVAEVAAKARNTGILIFAIGVGQVDLNTLKAIGSEPHKDHVFLVANFSQIESLTSVFQNKLCTVHMCSVLEHNCAHFCLNTPGSYICKCKQGYILSTDQKTCRIQDLCATEDHGCEQLCVNMLGSFVCQCYSGYTLAEDGKRCTAVDYCASENHGCEHECVNAESSYLCRCHEGFALNSDKKTCSKIDYCASSNHGCQHECVNAQTSALCRCLKGFMLNPDRKTCRRINYCALNKPGCEHECVNTEEGHYCRCRQGYNLDPNGKTCSRVDHCAQQDHGCEQLCLNTEESFVCQCSEGFLINDDLKTCSRADYCLLSNHGCEYSCVNTDKSFACQCPEGHVLRSDGKTCAKLDSCALGDHGCEHSCVSSEDSFVCQCFEGYILRDDGKTCRRKDVCQDVNHGCEHLCVNSGESYVCKCLEGFRLAEDGKRCRRKNVCKSTQHGCEHMCVNNGNSYLCRCSEGFVLAEDGKHCKRCTEGPIDLVFVIDGSKSLGEENFETVKHFVTGIIDSLAVSPKAARVGLLQYSTQVRTEFTLRGFSSAKEMKKAVTHMKYMGKGSMTGLALKHMFERSFTQVEGARPPSTQVPRVAIVFTDGRAQDDVSEWASKAKANGITMYAVGVGKAIEEELQEIASEPIDKHLFYAEDFSTMGEISEKLKEGICEALEDSGGRQDSAAWDLPQQAHQPTEPEPVTIKIKDLLSCSNFAVQHRFLFEEDNLSRSTQKLFHSTKSSGNPLEESQDQCKCENLILFQNVANEEVRKLTQRYKK

SEQ ID NO: 1165 - DNA, 169659 bp, Homo sapiens
  misc_feature (1)...(169659): n = A,T,C or G
tggagaaaccctgtctctactaaaaatacaaaattagccgggcatggtggtgcatgcctgtaatcccagctactctggaggctgaggcaggagaattgcttgaacccgggaggcggaggttgcagtgagtcgagatcgcgccattgcattccagcctgagcaacgagagtgaaactcagtctcaaaaaaaaaactttttttttttttgtagagatgaagtctcactatattgcccagactggtctcaaattcctgggctcatgtgcttctcccacctcagcctcccgaagtgctgggattacaggcatgagcttctgctccttgcctacttcattttgaaagggagtgactacctacccatatctcagttgtcataaatgcaattccacctgcagaaattcaggaagggaagattgtatttagcactggtgccaaatgcattcattaggagagacttaaaaacagtctactggttaggattaagttcagctgcaagttacagaaaaaatgaaatgacagtgggttaaagaaagaagtttatttctgtcttgtgttcaagaagtctggagacagtgagtgtccaaagtgtatgtggggtaaggccccatgccctgtgcctggttgcttttagcatgcatagcttccatttccatgcagtctcacccaggatttcgggatgactgctgagtactaaaccaaaaaacaaaaacaaaaacaaaaaaaaacaaaaccgatgttagagaggcaggtaaggcatttgaaaacattgttttatggaaaaaaaaagttatggaacatttataaaatgaaaaaagcagttttttctaaattaacacattattttataacttaaaatgttttaaatatgtatttgtgacttaannnnnnnnnnnnnnnnnnnnnnnnnnnnnnnnnnnnnnnnnnnnnnnnnnnnnnnnnnnnnnnnnnnnnnnnnnnnnnnnnnnnnnnnnnnnnnnnnnnnnnnnnnnnnnnnnnnnnnnnnnnnnnnnnnnnnnnnnnnnnnnnnnnnnnnnnnnnnnnnnnnnnnnnnnnnnnnnnnnnnnnnnnnnnnnnnnnnnnnnnnnnnnnnnnnnnnnnnnnnnnnnnnnnnnnnnnnnnnnnnnnnnnnnnnnnnnnnnnnnnnnnnnnnnnnnnnnnnnnnnnnnnnnnnnnnnnnnnnnnnnnnnnnnnnnnnnnnnnnnnnnnnnnnnnnnnnnnnnnnnnnnnnnnnnnnnnnnnnnnnnnnnnnnnnnnnnnnnnnnnnnnnnnnnnnnnnnnnnnnnnnnnnnnnnnnnnnnnnnnnnnnnnnnnnnnnnnnnnnnnnnnnnnnnnnnnnnnnnnnnnnnnnnnnnnnnnnnnnnnnnnnnnnnnnnnnnnnnnnnnnnnnnnnnnnnnnnnnnnnnnnnnnnnnnnnnnnnnnnnnnnnnnnnnnnnnnnnnnnnnnnnnnnnnnnnnnnnnnnnnnnnnnnnnnnnnnnnnnnnnnnnnnnnnnnnnnnnnnnnnnnnnnnnnnnnnnnnnnnnnnnnnnnnnnnnnnnnnnnnnnnnnnnnnnnnnnnnnnnnnnnnnnnnnnnnnnnnnnnnnnnnnnnnnnnnnnnnnnnnnnnnnnnnnnnnnnnnnnnnnnnnnnnnnnnnnnnnnnnnnnnnnnnnnnnnnnnnnnnnnnnnnnnnnnnnnnnnnnnnnnnnnnnnnnnnnnnnnnnnnnnnnnnnnnnnnnnnnnnnnnnnnnnnnnnnnnnnnnnnnnnnnnnnnnnnnnnnnnnnnnnnnnnnnnnnnnnnnnnnnnnnnnnnnnnnnnnnnnnnnnnnnnnnnnnnnnnnnnnnnnnnnnnnnnnnnnnnnnnnnnnnnnnnnnnnnnnnnnnnnnnnnnnnnnnnnnnnnnnnnnnnnnnnnnnnnnnnnnnnnnnnnnnnnnnnnnnnnnnnnnnnnnnnnnnnnnnnnnnnnnnnnnnnnnnnnnnnnnnnnnnnnnnnnnnnnnnnnnnnnnnnnnnnnnnnnnnnnnnnnnnnnnnnnnnnnnnnnnnnnnnnnnnnnnnnnnnnnnnnnnnnnnnnnnnnnnnnnnnnnnnnnnnnnnnnnnnnnnnnnnnnnnnnnnnnnnnnnnnnnnnnnnnnnnnnnnnnnnnnnnnnnnnnnnnnnnnnnnnnnnnnnnnnnnnnnnnnnnnnnnnnnnnnnnnnnnnnnnnnnnnnnnnnnnnnnnnnnnnnnnnnnnnnnnnnnnnnnnnnnnnnnnnnnnnnnnnnnnnnnnnnnnnnnnnnnnnnnnnnnnnnnnnnnnnnnnnnnnnnnnnnnnnnnnnnnnnnnnnnnnnnnnnnnnnnnnnnnnnnnnnnnnnnnnnnnnnnnnnnnnnnnnnnnnnnnnnnnnnnnnnnnnnnnnnnnnnnnnnnnnnnnnnnnnnnnnnnnnnnnnnnnnnnnnnnnnnnnnnnnnnnnnnnnnnnnnnnnnnnnnnnnnnnnnnnnnnnnnnnnnnnnnnnnnnnnnnnnnnnnnnnnnnnnnnnnnnnnnnnnnnnnnnnnnnnnnnnnnnnnnnnnnnnnnnnnnnnnnnnnnnnnnnnnnnnnnnnnnnnnnnnnnnnnnnnnnnnnnnnnnnnnnnnnnnnnnnnnnnnnnnnnnnnnnnnnnnnnnnnnnnnnnnnnnnnnnnnnnnnnnnnnnnnnnnnnnnnnnnnnnnnnnnnnnnnnnnnnnnnnnnnnnnnnnnnnnnnnnnnnnnnnnnnnnnnnnnnnnnnnnnnnnnnnnnnnnnnnnnnnnnnnnnnnnnnnnnnnnnnnnnnnnnnnnnnnnnnnnnnnnnnnnnnnnnnnnnnnnnnnnnnnnnnnnnnnnnnnnnnnnnnnnnnnnnnnnnnnnnnnnnnnnnnnnnnnnnnnnnnnnnnnnnnnnnnnnnnnnnnnnnnnnnnnnnnnnnnnnnnnnnnnnnnnnnnnnnnnnnnnnnnnnnnnnnnnnnnnnnnnnnnnnnnnnnnnnnnnnnnnnnnnnnnnnnnnnnnnnnnnnnnnnnnnnnnnnnnnnnnnnnnnnnnnnnnnnnnnnnnnnnnnnnnnnnnnnnnnnnnnnnnnnnnnnnnnnnnnnnnnnnnnnnnnnnnnnnnnnnnnnnnnnnnnnnnnnnnnnnnnnnnnnnnnnnnnnnnnnnnnnnnnnnnnnnnnnnnnnnnnnnnnnnnnnnnnnnnnnnnnnnnnnnnnnnnnnnnnnnnnnnnnnnnnnnnnnnnnnnnnnnnnnnnnnnnnnnnnnnnnnnnnnnnnnnnnnnnnnnnnnnnnnnnnnnnnnnnnnnnnnnnnnnnnnnnnnnnnnnnnnnnnnnnnnnnnnnnnnnnnnnnnnnnnnnnnnnnnnnnnnnnnnnnnnnnnnnnnnnnnnnnnnnnnnnnnnnnnnnnnnnnnnnnnnnnnnnnnnnnnnnnnnnnnnnnnnnnnnnnnnnnnnnnnnnnnnnnnnnnnnnnnnnnnnnnnnnnnnnnnnnnnnnnnnnnnnnnnnnnnnnnnnnnnnnnnnnnnnnnnnnnnnnnnnnnnnnnnnnnnnnnnnnnnnnnnnnnnnnnnnnnnnnnnnnnnnnnnnnnnnnnnnnnnnnnnnnnnnnnnnnnnnnnnnnnnnnnnnnnnnnnnnnnnnnnnnnnnnnnnnnnnnnnnnnnnnnnnnnnnnnnnnnnnnnnnnnnnnnnnnnnnnnnnnnnnnnnnnnnnnnnnnnnnnnnnnnnnnnnnnnnnnnnnnnnnnnnnnnnnnnnnnnnnnnnnnnnnnnnnnnnnnnnnnnnnnnnnnnnnnnnnnnnnnnnnnnnnnnnnnnnnnnnnnnnnnnnnnnnnnnnnnnnnnnnnnnnnnnnnnnnnnnnnnnnnnnnnnnnnnnnnnnnnnnnnnnnnnnnnnnnnnnnnnnnnnnnnnnnnnnnnnnnnnnnnnnnnnnnnnnnnnnnnnnnnnnnnnnnnnnnnnnnnnnnnnnnnnnnnnnnnnnnnnnnnnnnnnnnnnnnnnnnnnnnnnnnnnnnnnnnnnnnnnnnnnnnnnnnnnnnnnnnnnnnnnnnnnnnnnnnnnnnnnnnnnnnnnnnnnnnnnnnnnnnnnnnnnnnnnnnnnnnnnnnnnnnnnnnnnnnnnnnnnnnnnnnnnnnnnnnnnnnnnnnnnnnnnnnnnnnnnnnnnnnnnnnnnnnnnnnnnnnnnnnnnnnnnnnnnnnnnnnnnnnnnnnnnnnnnnnnnnnnnnnnnnnnnnnnnnnnnnnnnnnnnnnnnnnnnnnnnnnnnnnnnnnnnnnnnnnnnnnnnnnnnnnnnnnnnnnnnnnnnnnnnnnnnnnnnnnnnnnnnnnnnnnnnnnnnnnnnnnnnnnnnnnnnnnnnnnnnnnnnnnnnnnnnnnnnnnnnnnnnnnnnnnnnnnnnnnnnnnnnnnnnnnnnnnnnnnnnnnnnnnnnnnnnnnnnnnnnnnnnnnnnnnnnnnnnnnnnnnnnnnnnnnnnnnnnnnnnnnnnnnnnnnnnnnnnnnnnnnnnnnnnnnnnnnnnnnnnnnnnnnnnnnnnnnnnnnnnnnnnnnnnnnnnnnnnnnnnnnnnnnnnnnnnnnnnnnnnnnnnnnnnnnnnnnnnnnnnnnnnnnnnnnnnnnnnnnnnnnnnnnnnnnnnnnnnnnnnnnnnnnnnnnnnnnnnnnnnnnnnnnnnnnnnnnnnnnnnnnnnnnnnnnnnnnnnnnnnnnnnnnnnnnnnnnnnnnnnnnnnnnnnnnnnnnnnnnnnnnnnnnnnnnnnnnnnnnnnnnnnnnnnnnnnnnnnnnnnnnnnnnnnnnnnnnnnnnnnnnnnnnnnnnnnnnnnnnnnnnnnnnnnnnnnnnnnnnnnnnnnnnnnnnnnnnnnnnnnnnnnnnnnnnnnnnnnnnnnnnnnnnnnnnnnnnnnnnnnnnnnnnnnnnnnnnnnnnnnnnnnnnnnnnnnnnnnnnnnnnnnnnnnnnnnnnnnnnnnnnnnnnnnnnnnnnnnnnnnnnnnnnnnnnnnnnnnnnnnnnnnnnnnnnnnnnnnnnnnnnnnnnnnnnnnnnnnnnnnnnnnnnnnnnnnnnnnnnnnnnnnnnnnnnnnnnnnnnnnnnnnnnnnnnnnnnnnnnnnnnnnnnnnnnnnnnnnnnnnnnnnnnnnnnnnnnnnnnnnnnnnnnnnnnnnnnnnnnnnnnnnnnnnnnnnnnnnnnnnnnnnnnnnnnnnnnnnnnnnnnnnnnnnnnnnnnnnnnnnnnnnnnnnnnnnnnnnnnnnnnnnnnnnnnnnnnnnnnnnnnnnnnnnnnnnnnnnnnnnnnnnnnnnnnnnnnnnnnnnnnnnnnnnnnnnnnnnnnnnnnnnnnnnnnnnnnnnnnnnnnnnnnnnnnnnnnnnnnnnnnnnnnnnnnnnnnnnnnnnnnnnnnnnnnnnnnnnnnnnnnnnnnnnnnnnnnnnnnnnnnnnnnnnnnnnnnnnnnnnnnnnnnnnnnnnnnnnnnnnnnnnnnnnnnnnnnnnnnnnnnnnnnnnnnnnnnnnnnnnnnnnnnnnnnnnnnnnnnnnnnnnnnnnnnnnnnnnnnnnnnnnnnnnnnnnnnnnnnnnnnnnnnnnnnnnnnnnnnnnnnnnnnnnnnnnnnnnnnnnnnnnnnnnnnnnnnnnnnnnnnnnnnnnnnnnnnnnnnnnnnnnnnnnnnnnnnnnnnnnnnnnnnnnnnnnnnnnnnnnnnnnnnnnnnnnnnnnnnnnnnnnnnnnnnnnnnnnnnnnnnnnnnnnnnnnnnnnnnnnnnnnnnnnnnnnnnnnnnnnnnnnnnnnnnnnnnnnnnnnnnnnnnnnnnnnnnnnnnnnnnnnnnnnnnnnnnnnnnnnnnnnnnnnnnnnnnnnnnnnnnnnnnnnnnnnnnnnnnnnnnnnnnnnnnnnnnnnnnnnnnnnnnnnnnnnnnnnnnnnnnnnnnnnnnnnnnnnnnnnnnnnnnnnnnnnnnnnnnnnnnnnnnnnnnnnnnnnnnnnnnnnnnnnnnnnnnnnnnnnnnnnnnnnnnnnnnnnnnnnnnnnnnnnnnnnnnnnnnnnnnnnnnnnnnnnnnnnnnnnnnnnnnnnnnnnnnnnnnnnnnnnnnnnnnnnnnnnnnnnnnnnnnnnnnnnnnnnnnnnnnnnnnnnnnnnnnnnnnnnnnnnnnnnnnnnnnnnnnnnnnnnnnnnnnnnnnnnnnnnnnnnnnnnnnnnnnnnnnnnnnnnnnnnnnnnnnnnnnnnnnnnnnnnnnnnnnnnnnnnnnnnnnnnnnnnnnnnnnnnnnnnnnnnnnnnnnnnnnnnnnnnnnnnnnnnnnnnnnnnnnnnnnnnnnnnnnnnnnnnnnnnnnnnnnnnnnnnnnnnnnnnnnnnnnnnnnnnnnnnnnnnnnnnnnnnnnnnnnnnnnnnnnnnnnnnnnnnnnnnnnnnnnnnnnnnnnnnnnnnnnnnnnnnnnnnnnnnnnnnnnnnnnnnnnnnnnnnnnnnnnnnnnnnnnnnnnnnnnnnnnnnnnnnnnnnnnnnnnnnnnnnnnnnnnnnnnnnnnnnnnnnnnnnnnnnnnnnnnnnnnnnnnnnnnnnnnnnnnnnnnnnnnnnnnnnnnnnnnnnnnnnnnnnnnnnnnnnnnnnnnnnnnnnnnnnnnnnnnnnnnnnnnnnnnnnnnnnnnnnnnnnnnnnnnnnnnnnnnnnnnnnnnnnnnnnnnnnnnnnnnnnnnnnnnnnnnnnnnnnnnnnnnnnnnnnnnnnnnnnnnnnnnnnnnnnnnnnnnnnnnnnnnnnnnnnnnnnnnnnnnnnnnnnnnnnnnnnnnnnnnnnnnnnnnnnnnnnnnnnnnnnnnnnnnnnnnnnnnnnnnnnnnnnnnnnnnnnnnnnnnnnnnnnnnnnnnnnnnnnnnnnnnnnnnnnnnnnnnnnnnnnnnnnnnnnnnnnnnnnnnnnnnnnnnnnnnnnnnnnnnnnnnnnnnnnnnnnnnnnnnnnnnnnnnnnnnnnnnnnnnnnnnnnnnnnnnnnnnnnnnnnnnnnnnnnnnnnnnnnnnnnnnnnnnnnnnnnnnnnnnnnnnnnnnnnnnnnnnnnnnnnnnnnnnnnnnnnnnnnnnnnnnnnnnnnnnnnnnnnnnnnnnnnnnnnnnnnnnnnnnnnnnnnnnnnnnnnnnnnnnnnnnnnnnnnnnnnnnnnnnnnnnnnnnnnnnnnnnnnnnnnnnnnnnnnnnnnnnnnnnnnnnnnnnnnnnnnnnnnnnnnnnnnnnnnnnnnnnnnnnnnnnnnnnnnnnnnnnnnnnnnnnnnnnnnnnnnnnnnnnnnnnnnnnnnnnnnnnnnnnnnnnnnnnnnnnnnnnnnnnnnnctgggattacaggtgtgagccctgcacccagtcaacagtgtatactattgattggtttgattacagaataataccaaaaataataacagcaacaacaggccgagtgtggtggctcatgcctgtaatcctagcactttgggaagctgaggtgagtgaggagttcaagaccagcctgggcaacatgatgaaaccccgcctctactaaaatacaaaaaattagctgggcatggtgtggcgcaccggtagtcccagctactggggcggctgaggcatgagaattgcttgaacccaggaggcagaggttgcagtgagccaagatcgtgccactgcactcctgcctgggcgacagcgagactctgtctccaaataacaacaacaacaacaacaacaacacggaatagctaacacttaaattcagcactttctatgtgccaggcagtgtttgaagtgctttaaatatatctacatatgaaccgattgattctatataacaattaggtctactgttgtctccgttttaaagatgaggaaactgaggtcaagagagggtaagtaacctgctcagggttggacagctagcattattttgctttgtttatttttaactcctcactcttcacctatcctcagtgccttttggttagcaatggtgacttgaaaatacaaacatttcttgaaatccacagtaaacccaaaccacatgcaatgatgtttgttttttggaaatgatcacacaccacatcatattccaagtgttgagtgcatatgcctcggagtggaagtgggccttgagagcatgttgtatacattttgaaacaaataagcctggactttttatctgctcggtttggagaaaggggaatagcaataaaatcataaatcacatataaatgatgtaacacactgaatagtgttttataaaataaggtgagggcatgatggtgcacacctgtagtcccagctactcgggaggcttgggtgggaggatcactggagttcaggagttcaaagaggcagtgagttattgtgccactgcactccagcctagatgacagagtgagaccctgtcctcccaccactaacaaaaaccctgagatgataaatagcaaggcagcttgaaagtaaatagtaagtttaggatttgagaaaggggcaagatgttctaagttttcttcctttgttcagaaggaatctcagagttaaagctatgaaaagggaccaatctaattagtaaagagtttaaataggctgggtgtgttggctcacacctgtagtcccagctacttgggaggctgaagttgggggatccctcgagcctgggaggttgaggctgccgtgagccatgatcacaccactgcattctagcctgggtgagagagtgagaccctgtctcaaaaaaagagtttaaatggtttaaaaaggggggtgaggagagtagttatttgtaatgagctagtgcaggggtccccaacccccacccggaattagtccatggtctgttaggaaccaggccgcacagcaggaggtgagcagtgggcgagctcagcttcatctgtatttacagccgctccccatcgcctgtgttaccacctgagctctgcctcctgtcagatcaccagcaccgttagatccattagattcttttttttaaattgctgctgcacaaattaaggcattagattctcataggaacatgaaccctatcatgaactgcacactccttatgagaatctaatgcctgatgacctgtcactgtctcccgtcactcccagatgagaacatctagttgcaggaaaacaagctcagggctcccactgattcctacattatgttgagctgtataattatttcattatatattgcaatgtaataataatagaaataaagtgcacaataaatgtaatgcacttgaatcatcccaaaaccacccccacagctgggtctgtggaaaaattgtcttccacaatattggtccctgatgccaaaaagattggggaccactgagctagtgggttctggaacttcacctcttatgagcgatgtaaccttgggcaagttacttctctgagatactctataaattaaatcacttaatacgttgaaggcacttggcccagtgcctggcacataggagatgctgaataaacattcactatttttaatataatcttaatgcatagtaaaattatattaaaaagagtgagctagttcaatacagcaagtgtgaaaaactggactctgaaggttgacaggcccaggtccattcccaggtcaatttctggaagcaatttgctgaacaaacagttcgctgaaatagtgaggtttttttttaagttttgaaacatggtccctgccccacccctgccctgtccctgcctctgacaaagaaagaactatggcatttcatgacttgatttctggggattttcctttcagttttctactaatcaatgcattggaaaattgacctgctagtcctgggtttgaatttgttttacctttttttttttttgagatagggtctcgtgctgtcacccaggctggagtgtagtggtgcagtctctgctcactgcagtcctgggttcaagtgattcttgtgcctcggcctcctaagtagctaggactgcaggcacgagccaccacacctggctaatttttgtatttttagtagagattgggtttcgctgtgttggccaggctggtctcaaactcttggcctcaagtgatgtgcccaccttggcctcccaaagtggtgggattacaggtgtgagtcaccacacctggacttttttaactttttaaataaatttaaattttttttttgtagaaacgaggccttgctgtgtggaccaggctggtttcaaacttctggcatcaagcaatccttctatctaggcctcctaaagcactaggattgcagacatgagccatggcacctagacttgaccctgggtttgaattctggctctgacacttgctaactgtgtgtgaccttgggcaggccactgacccttcctgagccttatgggaatgtgggaataatattaggtaatggagcaagttaatataggtaaagaatttagaatagggcctggcacatggcctcagtctagtaccagagtccaagcccataaccactgtgccaacactcttgtaataaatgtatgtgggagacagggaggctgggaggctggatatgtgatgctactttatgtcaactacacatgaattttatatgtataatttatataaactaattgatgccatctactattattagactgaacaaatattgttacttggaactctcagatatgtaatagcttttttttattcaaatccaaaatgtaaaatgtgactatgagtaattgataatgaacttaactgataagaaacttcaggatagatttttctcaagttttccattcagtcttacagtgattaaagtgatgaaaaattccaactatgcatgccctgctcggagcgtccaagaagagcctaccaacgggggctacttaagctctcaaaggccaaacacacaaacggcattttgagtgcaagtggtctgtttgaactctgaaaaggcggggcagcgggcctgcagctcctggagttcagggagacccggaaatctcaccctgccctcttcttgtgttgtgtttgtcacagccttgcccctcttgctcgccttgaaaatggaaaagatgctcgcaggctgctttctgctgatcctcggacagatcgtcctcctccctgccgaggccagggagcggtcacgtgggaggtccatctctaggggcagacacgctcggacccacccgcagacggcccttctgggtgagtggtggtgctcacccccaaaagtgggcaggtgggggtggtttggggagggctcagggacagggattggtgactgtttgagaagctttcctttccctgggtccttgttggatgtgctgggcctggggtcctcactggtggtgaatgcatccggagttgagcacgtggttgcacacgagttttcaaaataaacttttctttgaagcctttaattgaatctgaggcttatggcttttctccaatattcagggcaagatttctcatctgaaaatgtccttgttgttggacctatctgggcaaaggtgttatgaaaattttttattgggtttgcccagctagatctgttaataatgcttccctgcatggcagcagggaagtaagagctgggccagaagagaggtggggacattgtgagctgaatcgaggtattaggaatggaaaatgccaggggtctattcatctgatccagtgaacatttttcctagaaaaaggaaatgtcatgaaaacacacggaaaacatgtaaatcagctgattctaaacaagggcattggtaagcctggcatgtggaggttataggaaggttgggcagtgccaagagaatgagttttggcattgacctgggttcaagtcctgcctctgctactttccagatgtgatataacctccctgaggctatagatgtgatataacgtaggtgatataacttccctgaggctcagttttatcatctgtaaaatggaagtgtgaatgccaaccttggaacatttctgagaaataaatgaggtaatatacatacattctaggtactcagtaagtaaaagctttaccacaactgtcattctattaagttctttgaaactgtatttgacatttataccttgttggccagccactcgaatctgaccccctgcaaaggctactaagagaactgcccagtgacctggtagcctcagtggcatccgaaattacaatcagggaccacagggacctaaagagccctgttttcagaggtcagaatctttattgatgttaactaagtgaggaccccagtgataggtcttccaggttcctgaaagtccttgtttccatagtgatgggggacaacacttttgcaaatgtgaaaaggagtgggannnnnnnnnnnnnnnnnnnnnnnnnnnnnnnnnnnnnnnnnnnnnnnnnnnnnnnnnnnnnnnnnnnnnnnnnnnnnnnnnnnnnnnnnnnnnnnnnnnnnnnnnnnnnnnnnnnnnnnnnnnnnnnnnnnnnnnnnnnnnnnnnnnnnnnnnnnnnnnnnnnnnnnnnnnnnnnnnnnnnnnnnnnnnnnnnnnnnnnnnnnnnnnnnnnnnnnnnnnnnnnnnnnnnnnnnnnnnnnnnnnnnnnnnnnnnnnnnnnnnnnnnnnnnnnnnnnnnnnnnnnnnnnnnnnnnnnnnnnnnnnnnnnnnnnnnnnnnnnnnnnnnnnnnnnnnnnnnnnnnnnnnnnnnnnnnnnnnnnnnnnnnnnnnnnnnnnnnnnnnnnnnnnnnnnnnnnnnnnnnnnnnnnnnnnnnnnnnnnnnnnnnnnnnnnnnnnnnnnnnnnnnnnnnnnnnnnnnnnnnnnnnnnnnnnnnnnnnnnnnnnnnnnnnnnnnnnnnnnnnnnnnnnnnnnnnnnnnnnnnnnnnnnnnnnnnnnnnnnnnnnnnnnnnnnnnnnnnnnnnnnnnnnnnnnnnnnnnnnnnnnnnnnnnnnnnnnnnnnnnnnnnnnnnnnnnnnnnnnnnnnnnnnnnnnnnnnnnnnnnnnnnnnnnnnnnnnnnnnnnnnnnnnnnnnnnnnnnnnnnnnnnnnnnnnnnnnnnnnnnnnnnnnnnnnnnnnnnnnnnnnnnnnnnnnnnnnnnnnnnnnnnnnnnnnnnnnnnnnnnnnnnnnnnnnnnnnnnnnnnnnnnnnnnnnnnnnnnnnnnnnnnnnnnnnnnnnnnnnnnnnnnnnnnnnnnnnnnnnnnnnnnnnnnnnnnnnnnnnnnnnnnnnnnnnnnnnnnnnnnnnnnnnnnnnnnnnnnnnnnnnnnnnnnnnnnnnnnnnnnnnnnnnnnnnnnnnnnnnnnnnnnnnnnnnnnnnnnnnnnnnnnnnnnnnnnnnnnnnnnnnnnnnnnnnnnnnnnnnnnnnnnnnnnnnnnnnnnnnnnnnnnnnnnnnnnnnnnnnnnnnnnnnnnnnnnnnnnnnnnnnnnnnnnnnnnnnnnnnnnnnnnnnnnnnnnnnnnnnnnnnnnnnnnnnnnnnnnnnnnnnnnnnnnnnnnnnnnnnnnnnnnnnnnnnnnnnnnnnnnnnnnnnnnnnnnnnnnnnnnnnnnnnnnnnnnnnnnnnnnnnnnnnnnnnnnnnnnnnnctgaccaacatggtgaaaccctgtctctactaaaaatacaaaaattagctgggcatggtggcgggtgcctgtaatcccagctactcgggaggctgaggcaggagaatcgcttgaacccaggaagtggaggttgcagtgagctaagatcgtgccactgcactctagcctgggtgacagagtgagactctgtctcaaaaaaaaaaaaaaaagaaaatagtggagtgacaatcgtgaaaccagaaagcaaacactatagctgtggcctggattctcaagtgcaatctgcttttttttttctcattttgatggggaacaaaaatggaaaagcatgctcattggtagtccttgccccgagggtatgaccttctcttcattcttagaataatgtagtgttttgtattttatgcatgtttgcttctcttggctcttggactatttgttcagaatatggcccaggccacatttcactttttaatggcaaatcattttggctgaagttatggcatccactggcatgatggattttactggttatttgcttgcaagtatgttcctgaaagtttaacagagtagaaacagcagaattgtttcttaggttaattttttttgaactttctgggttttaaaaatgtttatcttttatgtttaaattcaggtcagagtctcagtaacaacttgagtcagtttgaaaaaataacgcatgtatatatccaccatcctgtgaacatctgtgggctgttcactcggcagcctgtgatgtctgtccacatgggcttatctcttacctcattcatttatctggaatttctactctgtgccagatgccggttgggggtgtgggggtagtgtttaagatgaatagacaccatcaggaggtgcacagagtagtggaagagacaggcatgtgaaaagatcattaatttggtagaatcggtgtgcaaaagtagaggcatagctacattatagctcaactctgcctgctgagcaggcttagtgtaaggcagtggttctcaagctttggtctcaggatccttccttttacgctaaaaattatttttattttattattttattttattttattttgagatagggtctcactgtctcccaggctggagtgcagtggcatgatcatggctcgctgcagccttgacctcttgtgcttaagcaatcctccaacctcagcatctcaagtagctgagactacaggcacatgacactacgcctggctaatttttgtattttttgtagagacagggtttcgccatgttgtccaggctgatcttgaactcctgggctcaagcgatcctcccccctcagtctcccaaagtgctgggattctaggcgtgagccactgtgcccagccaaaaattattaaggatcccaaataacttttgtttgttttttaagaatcctgaggacaatcaagggagctttgtttatgtgggttagatctattggtatctacctgatcagaaatttaaaaataacaataataaaatcagaatgtgttaacaaactatatatgtataaaaaactatattttctggccaggtgcagtggctcatgcctgtaattccagtactttgggaggctgaggtggaaggatcacttgagcccaggagtttgagaccagtctgggcaacatagggataccttgtctctacaaaaataaaaaaatgaggccgtgcacagtggctcacacctgtaatcccagcactttgggaggctgaggtgggcagatcacttgaggtcaggagtttgagaccagcctggccaacatggtgaaaaactgtctctactaaaaatacaaaaattagcctggtttggtggtgtgcacctgtaatcccagctactccggaggctgaggcaggagaatcacttgaacccgggaggcggaggttgcagtgagccgagatcacaccactgcacttcagcctgggtgacaagagtgaaactgtctcaaaaaaaaaaaagaaagaaaaaaaaaaattagccgggtgtggtggtacacacctatagtcccagctaattgaaatgcttaggctgcaggatcacttgagccccagaggtcgaggctgcatgagtgagccgtgatggtgccactgcactccagcctgggtgacagagtgagaccctgtctcaaaaaaaaaaaaaaaaaaaaaaaagaagagtagcaccgttttacagttttgcaaatcttgtaacggtctggcttcgtagaagacagctagattgtcatttcttgaccattcaatctgtcatgaaatgttttcgttagattatatgaaaatgcatggatatgtagttggaaaagggaagagcatttaaatagccttttcatataattgtgaatgttctttgatactacaccaaaacttgacaaagagtagtttcttaaagtttagttgcaatgtgaaatctaaaatcagatcaataaactttttgttctctatatacccacaagagaatgagagtatgaaaggcaaacattcatgttattatggaaatagttctgacctcatggatcctctgaaaaggcctcagggacccctagaattccccaaactacacttgagaatggctggtttaagagaattgttcccagtgaaggtcctgcccacggagagccctgtgggacagcaggtggcagaggcatgaggatggagtgtggcagtggggctccgatgtggcgctgggtctgccagacaggtggtctgagctggagataaggcagcaataatttaggacctcgagggctccaaggaaggagttttgagcttcattttgcaggggtaggagctgtggagggctttaagcagtcaacagtgggtgtcgctttgtctttgcacccactgtactctccggacagacttgaccttcctgggttgtggcaaagagcagggatctaaatagcaggctgcaacaggagaaggaacgagcacctgctctagcccaaagacccctccaggccacaacgctggcaggtagagtcggagaatctgactgtgctgtacccagaaccctttggacttggattcttccccttgaccagccttatcagtggcacccatccccttccacactcctcgctaggccctcctcaagggggcgctaactggaaggcatgctgccccactgctaatggccgcctgcttcgtttgtgcacactttttctctttgttaccccactttcctatgaggaggtggacctgtctccagaacaaccagtggggtatatcagcctttttggaaaccttaaccctccttgcccaaactcccagagtattcttatttatttatttatttatttatttatttatttatttatgatagagtcttgctgtgtcaccaggctggagtgcagtggtgggatctcggctcactgcaacctccgcctcccaggttcaagtgattctcctgcctcagcctccagagtagctgggattacaggtgcctgccaccacgcccggttaatttttgtatttttagtagagacagggtttcaccatgttggccgcctgcctcggcctcccaaagtgctgggattactggcgtgagccgccgcacccggcccccagtgtattcttgattccctccactccacaaactactctacagtcagccagcttgtggtctctggtggtggtctgtcttatgaggtcttgttgacatatgcattcttttctaaatttaccaaactggctcattttatttctgctaactaaacttgaaagccttttcttttcctattatagactctcctttggatcaatactacacactcagaagttatgtttgtgttttaagagagcattttgtggcaatatggcatcaattctagaagtgggagacaaagatttaaaaggaagttggccctgcagtctggtcaggggatggtagggcctgagctccctcccaccccacaccccaccacacacactgctggaagaattccagaggtgttccagggtagacaccacagcatttagtaaaatttactcataacagttaatttactacttaaaaactaatgaagaaaatctaagaattcaccttttttttttttttttttttttttagacaggatcttattctgttgcccaggctggagtgcagtggcactatcatagctcactgcagcctgagctcaagcgatcctcccaagtcagcttcccaactaactgggactacagtcatgtactaccacgcccaactaattgtttaatttttttgcagagacagggtcttactatgttgcacagactggtttcaaattcttggccttatgcaatcctcctgccttggcctcccaaagtgttgggattacaagtgtgaaccattcctcctggcagaattcaccttacacagccccaaattctgctcttggggaatcacagtgtattaagagacacttattttcatttttgcatgtatctctaaacctgacatcaaaatattcataaaattgcaatacgtttcatataatgagctgaaacctcctaagtgagcaatgtgaagttgttggctgcctggagaattaaatgtaagcatggcctgctctgtgttgctaatggaaatttttacctaggttgatatttattaacccccccttttttttttgagacagagtcttgctctgtcacccaggctggagtgcagtggcgtgatcttggctcactgcaacctccgcctcccgggttcaagcaattcttctgccttggcctcctgagtagctgagattgcaggcgcccgccaccatgcccggctaatttttgtatttttagtagagacggggtttcatcatgttggccaggttggtctcaaattcctgacctcatgtgatctgcccacctaggcctcacaaaatgctggaattacaggcgtgagccaccgtgtctggctccaacctacatttttaaggcttagctgccactcaatggatttctacatcccaaaacaatacctttaattgacttttattggcctcctctgtgaaggacggaaagcagatgccagaagccatgagaggctctggctctccgaccaacccgtggaagccactagtcttaaatttcctgaagccattttgccatgattaaaacttttgtctccttccctgagctttccagagctttgtccattctcttccttctacctggaatatccttccccagacaagacccattctcatccagggccaggtcaaatgccacctcctccctctccaggcaagacctccattgagggaccacacacattgcaggccctctgccaaagtgccaaccctctctgccttacattccaaggggtaatagtgatacttacctcagagggattcacattttagctatttttgcacttgtctcattttactactagactgtctcttcaagatagggactgaatatttttcatttctcatagcacctatgaaaggcaactctcatttactgagcccctgctgtgggttgggacgtgttatctcacctaatccatagcaggagcaaacactgtaaggtaattcttgttatattctattttcagacaaggaagctgaggctcagataggttaagcagttttggcaaatttgtcaagacttctgcaaacctagacagaaaaggtgctcaacccccagcccctttatggaaaggatgcatggcttaggggcagatatgcgttggagcaaagagaaagacacacgtactcttgaatgtactattttagcccctgcttgctccttgacccagagtttttgtgtagaccatagaatgccctgcccatctgtatttggaggtgctgctgcagccggtcacacctgggttctactgacctccagccctggctgtggtcctgcccagggctcagtgtgtattgaacaagtaagtgaatgagacatgcagaaggctgatttcattcttatttgaatgatttcaatcttgattaaccttcttagcaagaggttattttcttctcctggacctcagttcattcatctctaaaagaaggaagttgaagtcaatgatctctcaggtctcatctcagatgtggtgatgtcaccaattcccctgacatcccttctatgtgggaaccctgatgaaatccgcagctttccctcactgtgtccaggtaggaaagccaaggaggaaccatattctggaagccaaggaaggagaagttttgagacacagggtggtcagtaggatcaggcaggacaacagggatggggcagtgggatcaggtaacacagcagggctgggcagtgggttcaggcagaacagtgggctgggcaggggatcaggcaacacagcaaggttaggcagtgggatcagataatgcagggctaggcaatgggatcaggcaacacaacagggctaggcagtgggatcaggtaacacagcagggctgggcagtgggatcaggcaacataacagggctgggcagagggatcaggtaacacagcaaggctgggcagtgggatcaggcaacacagtagggctgggcagtgggatcaggcaacatagtagggctggacagtgggatcaggcaacacaacagggctgggcagtgggatcaggtaacacagcaaggctgggcagtgggatcaggcaacacagtagggctgggcagtgggatctggcaacacgacagggctgggcagtgggatcaggcaacacagtagggctgggcattgggatatggcaacatgacagggctgggcagtgggatcaggcaacacaacagggctaggcagtgggatcaggcaatatggccgggctgggcagtgggattaggcagtgaagcaggggttgttaaacttcattgtgcatcaaaagctcctggaaggcttgttagaacacagattactgggccctgtgctcaaagtgtctgattcagtaggtctgggttggagcctgataagtggtattcctggaaacctcagtttgagaactattactgtagagaaacctacaaggttgggtgggaatgggcaggaggaaaagatactagaagaagatgctgtggggcatgagccggaaagacaatacaagatgagtaacatctgcagagaattgcagctgcagagtataaactaactgtaatctaggtccagcccttctgaagctttacaaataagctgctagcattgtccagccttatagggaattggcaaaaggtgagtttcaggcctacatgggagccagcctcttacagcacagcagttagcaatacacatctaaagaactaagtagctggcatgtgtctttatcatcagaatagattatacaaatgaaggtcgatgcattgagcttatcaaattgttttaaatatagcaacgtttgttttaaaatttttttttaaacctttgaagtaaaactgcctctttttcagtgctcagctgcagtgcatcacgggcagtacaatgacagctggaaacatggaccccatggaggcgctgtcatggccgccctcagcacagacctgctgttccctatcaaattcatcctctgtgcctatgctctgtttaatatagatttttataaactgtatgaagtaaaattcttcattcctatcttgtgattaacgctggaagaatccaaaaagcacagcgtctgacctccaataagccataaagttaaaagcttttctaggcaatgaatatataacctgatttttttctcctacagatcctctctctccccttctttctccctttctcctttgtgtgaaactctttctttatccctttccttttctataaacttccttgatctttccctctccagtactccccttcctcattcccttcttcagttccaggatgttctctcctcagcttgcccatatattttgcacctgcaactcatgtgtgtgtcagggagtagaggtgagggattatcccttccgtgagtgacagtcacctttcttttctttgctggctggtgcttttaggagacaaggtgtacaaccttacccctaaggagccagtcctgtccttcgtctctctatctaatgctaataatgataacaatagtagtgatgacggccgggtgcggtggctcatgcctgtaatcccagcacttggggaggccaaggtgggtgaatcacctgagatgaggagtttgagaccagcctggccaacatggtgaaaccttgtgtctactaaaaatacaaaaaattagccaggtgtggtggtgggcacctgtaatcccagctactcgggaggccgaggcaggaaaattacttgaacctcggaggcggaggttgcagtgagctgagatcacaccactacactccagcctgggcaacaagagtgaaactccttctcaaaaaaaaaaaaaaaaaatagtagtgatgacaagccaccatgtgccaggcactgtggtaggcagctcacacttcactctgcatgtactattatcccttaaatgtctcatacaaggtcattcaactactgagcagccagaggtagaattcaagaagcgaacttgctgttttctctacttaaactcttttatcacccaggctgcagtgcagtggtgcgatcatggctcactgcagcctcgacctccaggcccaggtgatcctcctatctcaacctcccaagtagctgggattacaagcacgcaccaccatatccagcaattttttttttcatatttttttgtaaagacagggtttcaccatgttggccaggctgttctcgaactcctgagctcaagcgatcctcctgctgtggcctcccaaagtgttaggattacaggcataaaccaccacaccccgccttcttgaactcttttctataaccccacccaccctgttttatccagttgaattggactcatctttcaggtctcagtggaagcgcttctaatcttctaggttgggatttaataccccaactattgcattcccatggagtgctgtatgtccccaaaactgcacttagcctgtacagcaattgcctgcttaattgtctgtgtagttcgtcactgtaccagcatagctgagcaaggtgcctggtacacagcaggtattccataaatgcctataggaaaagtaaattaacggactcttcctcaataaatatatatatgttctagaaatttgagttgtatattagtttcctagggctgctataacaatataccacaaagtgggtggttaaacaacagaaatgtattgtctcacagttctggagctagaagtctgagctcaaggtgtcggctgtgttggtttcttctgagccctctctccttggctcataggtggctgtcttctccctgtgtctccacgtggtcttttccctctgtacctgtgagtgtccagacttcctcttcttataaggacaccagtcacattgaattaggctcgccctaataacctcattttaacttaatcacatctttgaagaccctaactccaaatccggttacctcctgaaggcctgggggtgaggacttcaacatatgaatcgcgggcagggagagggacagaagtcagcccatgacaagctgctttgcttttcactttcccagtttgtggaggacagtgtgtcatctttcaacatgtttctaaatagcctctttttcctttctgattcactttatgttcccacttcagggtgatatgagaaacgctggggaagcatgttcaaagacttgagcagtgggtcacttattactttaccatggcatatttcagagtcattaaagcagctccagcaagcgcagtgggctgtgcagccggaatcccagggctgaagatgggacaggagtgcaatctaaccaggatgtgaaaccaagtccaagtaaggtttttcaaaagccaagaattagaacgactaactcagtcctgtttcagtatatccaggggaggctgatttatagggaaagatgaaaggaggacaatgtgtatattttggctgctcagaagaccatggggctagacatgggggaggaggaagttattataagcctacagccagccaatgagtaagaacatcaaagaggaaggctggttggccagatggaccaagagctggggcacaggcaggatctttgggagaaacaagatgaatggatgcttcggacaacctaagttcagagcccggaggggcctttagaaaggcatgatggattatgtgtactgtgggtcattgcgccatgagaagtcccatgggggatgagccccagaggcccttaaagtcagggtggaccattaagtaaactgcggaggaatttcttccaggagggctcagacttggcaaaggctgggaagggctgctttccatctccggctcttaatcccccagccctgacactggggctcgcttgttccagcctacttgatccatttattgaataaagatatactgagaaccagccgggcgtggtgactcacgcctgtaatcccagcactttgggaggccgaggtgggcggatcacgaggtcaggagattgaggccgtcctggctaacacggtgaaactccgtctctgctaaaaatacaaaaaattagacgggtgtggtggcgggcacctgtagtcccacctactctggaggctgaggcaggagaatggcgtgaacccagaaggcggagcttgcagtgagccgagatagcgccactgcactccagcctgggcaacagagcgagactctgtccccgcccccccaaaaaaagatatactgagaacccttttattccaaggtctgcattaggcccagtgaaagatgaggaatccttaaatctttgggacttggtggggtcaccggggatacatcctcctctcctaggtaccgttcatctgtttgcacccagatgtggcctgtcccatgtgattgtcccaccactgaccgaagcaggcctctccattctcctcttccagttaaagctgaatttgtctccaaagtgaagaagaataggaaaaccatcaattttatggagctttttaactatgccaaaatggtttcattctgatacactttttttttttctttttgagatggagtcttgctctgttgcctgggctggagtgcagtggtgtgttctgggttcactgtaacctccgccttttgggttccagcgattctgctgcctcagcctgctgaatagctgggattacaggcacgcaccaccacaccaggctactttttgtatgtttagtagagatggggtttcgccatgttggccaggctggtcttgaactcctgacctcaggtgatccacccaccttgacctcccaaagtgctgtgattacaggcgtgagccactgcacccggccctgatatactattttgtttcataatttgcttgggtaatcattgattcatccattcaacaaatacgtatgaagaagctacagtgtacaaggctttgctttgggtgccaaggatactgcagggtcaggccagggtcacatctggctcaccaccagtcaggctttagggtttggtacaaattccacggcctcaggcaccatgggtgcataggatcagcaaaataagtccttaaagagatggaaaactcactcataaaaccatctgggcttgatgccttttgtagaggggatatatttgacaacaaattaaatatcttcaaaatccatttgtgcattcaggtttttcatttcttcttaagtctattttggtcattgatatctttctgaaaagttttctcatttgtctacattttcaaatctgttgttataaattatagctcataatactgagttacgttttaatagggaacatgtattttataaatacatgtttataaaaaatagggtcccactatgttgcccaggctggtctcgaactcctgggctcaagcaatcctcctgcctcagcctcccaaagtgctgggattagagatatgagccactgtgcctggccaggggacatgtatttgttttttttttttttaacaaaaagtacccagtgttaggccgggtgtggtggctcacacctgtaatcccagcactttgggaggccgtggtgggcagatcacttgaggtcaggagtctgagaccagtctggccaacatggtgaaaccccgtctctactaaaaatacaaaaaattagctgggtgtggtggcgggcacctgtaatcccagctacttgggaggctgaggcaggagaactgcttgaacccaggaggtggaggttgcagtgagccgagatcgcaccattgcactccagcccaggcaacaagaacgaaactccgtctcaaaaaaaaaaaaaagaataaaaaaaaagacaaagaaaaaaagcaaaaagtgcccagtgttttattctcatagatcacaaagctcttagcaaaaattctgaagaaacactgagacctgggggatgggtgtgtgttgccgggagaggagtcgctattgcctcttgggtttctccgataacacctggcttttgtagaagatcttcacagtttttcaaagcacccatcccttgccttacctctcctgtctcccttgtctgcctgatgcctccaacttctcagaagtgccagggccagggcactgctgggcccatggtgtgggtctacattgcagtaaaaggctcgttacccactcccctcaacacaggagtctcctgtttttaggcagcttaagaaagcagtcttgtctgtggaggaatgcccagccttcttggtgcagatgctgggtttggggacccagctgtttgcaggagttgtctaggaacgtcagtacccagggactgtgagactcctgggatgttatagtccccatgctagcagagggaagacactgggcccatgagaagttgagtttaggtagccagtcctgctgggagaaaggaaagcctcagatgccagcaagcttgctgtccagccattttctgacaaccctgcttattgcaccatgtacagtaatcaacacagacttgcatctgctctgaggggtgcaggtggtgctccatggaacacacacatgcacgccttcacccaccctttcctgtacctttggaattcgtggcataggaacactatatctattgcacttgggtgtggttataatgccagggtaaagataagtttctctgtggagtacctgaatgacaagatcatattttgtgtcagttccacatggaagggctcttcctcacagacattggaagggtaacagtagaatctaagctctaggaaggcagggtttttttgttttttgttttgtttttgtctgcacatgatagacacttagcaaatatttgctggatgggtggacaaatggaaactggaatgaaatggagatgcctaggtgagtgtgggaaggactctgcctctcctggtctttgccctgtagatgccaaatatcctaggcgggaactgggaagttggcagatgctgctgtgtagagagtcagtggagcaaagactggaaaaacatccagcctgtgtcagctagcaaaagaggggttttgggtctattttggggtcagaatattagaggaggtaacctgtaccctcaggcttcagagtgtggttgactaggaggctccaaagagtaagtgaaacccaaggggacggagataggaccacttgatccatccttgtaggttcagagctatgtcttatcaaatgttttcccttcatgtagtagcatgataatgaactcttcctactttggtttgataatgcaatggattatatggatagattttctagtgttgaaccaatccttgcattattgaggtaaactttacttgatcataatgtactttttaataccttactagaattattttgctaatctgtttttgtatttagattcataaattaaactggcagatattccctctaattttcattttttgcactctctggttttggtatcaaagttaagttagcttcatgaaaataagttgtttttgtaaagtaggtattagctattccttaaagagctggcaaatttgttcataaaaccatctgggttgaatcccttctgtaggggaaatatgtttgaaactaatttaatttctttaaaagccattagtctatttgacttttctatttcttttgagtctattttagtaattgatattttccttgaatgttagccatttgtctacattttcaaatctgttggcataaatgacagttcataatactgagctgtgttttaataggggacatgtgattctttaaccaaaggtgcccagtgctttgtttctgtaggtcacaaagttcttaggaaaaattctaaagaaacattgagacctgggggatgggtgtgtgtgctgcagggaggggagtctggattgactcttgagtttctctgataatatctcgcatatgtgaaaaagccgtacagtttttcaacacacgtattgcttgccttatctcttttgtcttctcaaagtccttgaaatgtagattttataatcagtctcaatttgtagataaggaaaggccaatcagacataccagtttatctataatatagatgagatcagaagccactcctagatcacaccattttaattagaagagagtttagagatcatctcattgagaaactcttaacctgggatccatgtccctcaaagtgctcttgggtagacttcagtggctccataatttggatgagaacaaaattacattatttttcactaaactctaagtgcagtttagcattcccttctattatgattgcaagcaacaaacaccagagtagtagcagtactgtgtctccagtagcaatcacagatattttcatggcacattgtagccatcagagataactcaaaatactgtttacactcatcactacttcaaaattacactagttagtagacccgcctcttgatcttgacatgttgtttttaaaagtacatgttactctataccaaatttttaaaaatattttgataactgcagttcaaataattggcctcctttctaatcctttgcattcatttacttgtttattgtgataaaatatacataagataaaattgactattttaaccgtttatagtacatgtttgatggtattgagaaaatttacaatgttgtgtaaccatcaccactatttccagagcttttcatcatcccaaatagaaactctgtaaataatgaagcaataactcctcattcttcccttccccaccccccagtaacttctattctacttttttctctatgaatttgcctaaatacctcatacaaatgaaattctatcatatttatcctttggttgttagcttttttcatttagcttagtgttttcaaggttcatccatgttgtagcatgtatcagaacttcattctttttgtggttcaaaaatacgctacattttactccattcacctgtcaacggccacaggttgttttcacctttggactactgtgggtttttttgttttgttttgttttttgtttttttgagacagggtcttattcctatcacccaggctgcagagcagtggcgtgatccgggctcactgcaaccttgacttccctggctcaggtgatctttccacctcagcctcccaagtagttgggactacaggcacacaccatgcctggctaattttttgtattttaagtagagacagggtttcatcatgttgcccaggctggtcttgaactcctgggctcaagcaatccacctgccatggcctctcaaaatgctgggattataggtgtgaaccactgtgcctggccacctttgagctattgtgaataaggctgctatgaacattagcacacaagtatcttcttgagttcctgctttcaattcttttggatatatactaaggagtagaattgctgggaaatatggtaattctatgtttaactttctaggaactgctaaactgtgttcaacagtggctgcagcatgttacattcccaccagcagtacacgagggttccaatttctccacatcctcaccaatacttgttattttcattaaaaaatattaattaccatcctagtgggtgttgcattttattttaggcatgtaaaaactttattctgagaaggagtcatgggcttctccagactgccatgggggtccctgatacaaataaaggttaggaagctaggatgagggaactcaagagctcagagatattgtcacatgtccaaggtgaggtgatggactagcagcagcccaggcattagaactaagtttcctgggtctcaaaggagcccttttccctcctaccagatggtctgttctcatgtacatgatccaccccagccagtggtcagaactgagtcagagctggagctaagccattgaccaaccagctactgaagctgaggccagcaccagacacagactagatagacataattaatccctgtttgcaaatcactgcaatgtagaactaccatgcaccaccacagctgctaaatccttatccagcctacaaacatccactgaatgcctgtgtgcagatcaaactccatattcagttggagtgtttgggggacacttacggggacatcaacggacaatttggtttataggtataaagttcaggagggagaaataaccctgtgtatgtttcatttaattacagaataggtgtcttgatctctcgtttctttgtggggaccctctatttccgcagaggcaggttcagatggcctcttgagtctcatcgcccattttcttactgagctctgtcagccttggctcctgaacctttccacacttgtcagctcagtttttaaaataaccatagctgactttttttttttttttttttttgagacagagtcttgctctgtcgcccaggctggagtgcagtggtgcaatctcggctcactgcaacctccatctcctgggttcaagtgattctcttgcctcagcctcccaagtagctgggataataggagcctgccaccacacccaactaatttttgtatttttggtagagacggggtttcaccatgttggccaggctgatctcgatctcctgaccttaggtgatctgcctgcctcggccccttaaactgctgggattacagaagtgagccaccatgcccagtcatcatagctcacttttttttttttttttgagatggagtctcgctctttcctccaggctggagtgcagtggcgcaatcttggctcactgcaagctccacttcccaggttcatgccattctcctgcctcagcctcccaagtagctgggactacaggcgcccgccaccacagctggctaatttttttttttttttttgtatttttagtagagatggggtttcactgtgttagccaggatggcctcgatctcctgacctcgtgatccacccgcctcggcctcccaaagtgctgggattacaggcgtgagccatggtgcccagcccatagctgacttttaatgagttttaattctagctctccactgtgcaaccatgaataagtaacttaaccaccctgaagttcagttgtcttgtttgtaaaatgaggataataatgatacctccctcatagagtggttatgaggatggaataagacaatacacatagagggcttggcacagagcctggcacagaggaagcatttcattagcgctgttattgttgattttaaaatttattattaaaagtcactttgacgcctataatcccagcactttgggaggctgaggcaggtggataacctgaggcgaggagtttgagaccagcctgaccaatctggtgaaaccttgtctctactaaaaatacaaaaaattagctgggcgtggtggcagacgcctgtaaccccagctactcgggaggtgccttgtggtaaaagatgggccaaggagtttttggttttaaagcgaaagcctgtaatcactgtgcctgctcacagggggattgctatggctaagttcatagataattgggtagttggctgaggcaggagaatcgcttgaacccgggaggtggaggttgcagtgagccaagattgtgccgttgcattccagcctgggcaacaagagtgaaactctatctcaaaaaaaaaaaagtcactttgtaagttgcaaagtatgactctactatgagatctttacaactaggaattaagccagttacgatggcccatgcctataatcccagaactttgggaggctgaagtgggaggattgcttgagcccaggagttccagaccagcctgggcaacatggtgagagcccatctcaaagaaaacctaggaatcagagcttctcatctctgggcctaaaacatctggtggagtagcttctcaggaactgtatactgaatgaatgagtgagatgacatttactaacagttttattaacttttatcttttatttacctatttgaccatctactgtactgacttaaatataaaatagcagtttttctctttcaacctttttttttgaggcagagtctcactttgccacccagactggagtgtggtgatgcaatctcggctcactgcaacctccgcctcctggtttcaagtgattttcctgcctcagtctcccaagtagctgggactataggtgcgccaccgtgcctggctaattttgtgtttttagtagagacagggttttgccatgttggccaggccagtcttgaactcctgacctcaggtgatccaccggccttggcctcccaaagtgttgggattataggtgtaagccaccatgcctgcaccagcccctccccgcccccttttttttttgagacagggtctcactctgttgcccaggctggagggcagtgccctgatcttggcttacttcagcctctgcctcccatgctcaagtgatcctcccatctcagcctcccaagtagctggggccacaggtgtgcaccaccatgcccagataattttttgtatttcttgtggtagagatggggttgcccaggctggtctcaaactcctcaactcaagcgatccacctaccttggcctcccaaattgctgggattataggtgtgagacaccatgcccagcctctttcaactttaaatcaagtatcagtcttagaatcaattctctgtagaatttgtcatatgagtcagtctgctctctatttctatgagtttggcttttttaaattccacatataagtgaggtcatgcagtatttgtcattctgtgcctggtttctttcatttagcataccatggggccaaggacattttttcttttgttttctttttcttttctttttccctgctccagctcaaaggatggggctggggaatctttagatgagtcgggggaaggcctcagtgagaaggtgactcttcttcacatacctgaaggcagtgacaggatgaggcaccagaataatgttgcaggcagagagaacagcaggcaggagtatgcttgaattgttcagtacagcagggaggccagtgtggctcttgccgagtgagtgaggggcccacggtaggagatgagatcagagaagtaacaagggggcctttagtggggccattgaaacagcttaggattttctctgagagagatgggagccattggtaagggaattacatgatttcactttttttttttttttgagacggagtctcgctctgtcgccccggctggagtacagtggcgtgatcttggctcactgcaagctccgcctcccgggttcaggccattctcctgcctcagcctcctgagtagctgggactacaggtgcctgcaaccatgcctggctaattttttgtatttttagtagagacggggtttcaccgtgttagccaggacggtcttgatctcctgacctcgtgatccgctcacctcggcctcccaaagtgctgggattacaggcgacttttttttttttttgagatggggtcttgctctgttgcccaggctggagtgcagtggtgcaatctcagctcactgcaacctccgcctcccaggttcaagcgattttcccacctcagcctccccagtagctgggactacaggggcgtgccaccacacctggctaatttttgtattttttggtagagacggggttttgccatgttggctggtctcgaactcctgacctcaggtgatccacctgccttggcctcccaaagtgctgggattacaggtatgagccaccatgcctggccgatttggtttttaaagaatcacttcttctgctggattgggaatagtctgcagagaggcgaaggcaagcagtgcttaggaggctaatgccatcatccaggggagggatgatggtagggttgagtaatccctggagtgtaacaaacactaaggattattttattttgtggcaaatgtcctaaagctttcttgaacagtaccaggttgctgggaatgtatagagacagcttacagagcaccctacagttttagcaagggaactttcacgtaatataaaggcatgcaggttgtactcttgtatagttgtgtgtacattggttgtttcctgtagcaaaatcatgaagagtatgaattctagagttagagtccctacattcaaatcatggctccaccagttactaactgtgtgaccttgggcaaataaattaccctaacttctctgagccttcagttttccctctagtaaaatggggacagtgggttgctatgaggagtaatgagttagtgcgtgtacaacatttagcattatactgatatataaccatggctcaataacatagtagctatcattatggatatgaatataaccatttgtaaaggtcaaggaacatctctatttaacttagtttatttatttattttttattttttgagacgtagtctagctctcttgcccatgctggagtgcaagggagtgaccttggctcactgcaacctccacctcccgccttcaagcgtttctcctgcctcagcctccagagtagctggcattacaggcatgcgccaccaggcccagctaatttttttttgtattttcggtagagacggggtctcaccatattggccaggctgctctcgaactcctgacctccagtgatccgcccgcctcagcctccaaagtgctgggattacatgtgtgaactaattaacttagtttatttagagccatagcatatggggctgaaaaagaactaagacacttcatttagtctaaccctctcattttacaggggagaataaaaactagagatagaaaattccatagccaaaataaaataaaataaagttatggtccgggtgccgtggctcacacctgtaatcccagcactttgggaggccaaggcaggcggatcacgaggtcaagatatcgagaccatcctggccaacatggtgacgccccgtctctactaaaaatgcaaaaaatagctgggcatggtggcgtgtgcctgtagtcccagctactcgggaggctgaggaaggagaatctcttgaacttgggaggcagaggttgtagtgagccgagatcacaccactgtactccagcctggtgacagagtgagactctgtctcaaaaaaaaaataaaataaaaaataaagttatgcggccagtgtcacctagctggtagcagagtggggactggaacacaggtctctggactcccagtctggtgctttctctgctatgccacattgcttccatagaaccctcagtgcagcaccaggtgggaataataataacaacaataaaggcttatttgactcttactttgcgccaggcactattctaagtacacatatttgctcattttatcctcatgacaaccctatgaggcaggtacaattattgtccccatcttgcggaagaggaaactgaaggagagagggataaagccacttgcccagggtggagaatgagtgtggtgtgggagacatgggcaggaggctgctgccccgttacactgcacgacctgcttctccctttatgtaacagggaaattgaatccagtcgttcaagtcctttttcagccttcaaatttgcagaccctaaatgcttttctattatcgggtcttgaataaataccattccacttcattaaaactgctgtctttttaacttgtcttcatcttaatgatcatctacaagaaagactatttgcagaagagcctagaaaccaagtcaccaagcctgtgagagattcctgaaatgttatttctggcttccatagcaaccctaacatagggcgttaagcttaacggagtcagcgagagcagctggagccgggcattgaagcgctgagagcgctgaggaaacaaatcgttggctcaatagttttccttttgtgtaatatactgtcccagtgtgtttagggagttacgacttctgccaagtaagaatggaggaaatgaagcattgtatcaaagtgtacagagtttccaagcaaattggaggatgagtacaagtctgtgtctaggggagtctctgcagaagatgagggtgggcctgcagagacgtaggggtggggaggaggggcagctctgctttccccaaccttgggtgactaggccttcaggtcagctttgtgaagaggactgagcatgcctggttgccttttctgttccaccccgtttgccgacctcagtagagagtgggggtgatacgtgagtgaggcatcaaagaggccaagatgctgaggatgacagaggcagatatgctgaggctgacggagccaccagggccagtgcaggaaacagagctctctaggtatttcaggaagaaaaagatttaacacggggaattcggttatatagttgttggaagggctggaggagtgggagcccagggaccaccacgcaagagcacctcactgggatcaggatggtgctgccaccagaactgacgtctgtgcagctgctgagcagacaccagaacacgaagtctggctgccgcaactaactggctttctaaaaccttgcttgctggcagagccaccatccaccccacttcatcctttgtgaatatattgaattggggttccccaattcttacccagaaccctagctgcctgaaagatagtctgggaaatatttgttttgtccttttagcttctgcaacgctggaagactcatggggagagttgggagttcatgccaagtgccaatggacatggacagcaatcgattttttttttttttttttgagatggagtcttgctttgttgcctaggttggagtgcagtggcacgatcttggctcactgcagcctctgcctcccgggttcaagtgattctcttgcctcagcctcccaagtagctgggattacaggtgcacaccaccacacccagctaaattttgtatttttagtagagacggggtttcgccatgttggccaggctggtcttgaactcctgacctcaggtgatctgccttcctcggcctctcagagtgctaggattacaggtatatgccactgcaccctgccatttttttttttttttttgagatggagtctcactgtgtcgcccaggctggattgcagtggtacaatctcggctcactgcaacctctgcctcccgggttcaagcaattctcctgccttagtctaccaagtagctgggactacaggcacgtgccaccacgcccagctaatgtttgtattcttagtacagatggggttttgccatgttggccaggctggcctcgaactcctgacctcagccgatccgcccgccttggccttctaaagtgctgggattacaggcatgggccaccttgctcagcctgatatttatttcatttgaaatttggattaaataggtagaggagttgaacaccaaatagagatgagttgaaagggcccatcgttgacctaaactatttgctccaccatctgaaagtcctttgggattaagtccagggttagataacagaggggcagaaactcaactcccagagacaaaggagtggccttaacattctctctggtgccttctctattagtatatacataaggaaacattaatttacacccaagagtaggctgggagcttggatgggaggggaagcagggttgggggtcaggcctggagagattggctttgggctgggccatagatggagaagactgaagtctgggctgtcaggaacccttagaataagcctaaaataggaagggcacatctaaaacccttcagtgctcctcgtttgtcctaataaaatccagaccttttttttttttttttttttttttttggaacagggtcttgctctgtggcccaagctggagagcagtggcacaataatggcttactgcatcctcaccctccagggctcaagccatcctcctgcttcagcctcccatgtagcgaggactacaggcctgcaccattacacccggctacttttttttttttaatctattgtagagagggggtctcaaactcctgagctcaagtgatcctcttgcctcagcctcccaaagtgctgagattacatgtgtgagccactgtgccctgcctgaagtccagacttcttatgcaggaggcacatgccatccacccacatggccctgtcttccccaacttgtcctttaggacccagccttgccacatcacctgtggttacctgggtgcgtgtgcatcccactctgttctggcctccagcttttgcatacgctgcccttttacctaaatgcacaccccagcttgttgcctggtcaacacctgctcaccttataataacatcatcctattataatactcatcaccttgtccagggatcttcccccaccccctatcttgggactggtgatctactccaggctctagtcactcgtccttttttgttgttgctttgttttttgtttttagagacagagtctctctctgttgcccaggataaagtgcagtggtgtaatcatagctcacggcaaccttgacctcttgggctcaagcgatcctcccgcctcagcctcccaagtaactgggactacaggcgcacgccatcatgcttggcttgtgaaaaaacttttttttttgtagtgatgtggtatcaccatgttgcccaggctggtctctaactgctgggctcaggcagtcctcctgccttagccacccaaagtgctgggactataggtgtgagccatcgtgcctggcctgctcatattttttatgaatcttaatgaatctgtcttctctacagggttgtaagctcctcccaggctgagactggttctcatactctatccctagcacccagcacaaagaggggattcctgcaatgtttgtacaactcaaccaaaccaaaatgatgatagaattgtctccgaagacaaattttgcctttgctggcacagggctgtggaaccttgtgccctgttatctaactggccccttcctccttgtgtacctacacctcctcccctcctccttccagggaaaggccctgaggcgctgtgttttggggcctccacctccttcctctcctctcttgcagcccagccctgtgttgctatttattcacaggtctctgctctgctctggctttcacttgctgaattctcagaaagcagatgaagcaatttattcagttaaagtgcccctgtgggtcaaatgccagcttgctttttaaaaccttcctatgctgctttttactttgcagagagcagaaattacctgttttgtttcctggtgctttctgcactctcttgtattgagggatggttgtgtgtctgtgtgtgtgtgtgtgtctgtgtgtgtattacaattttaacgtacatgtcatttctcaatttgagaaaggaagaaagatagtgagggggtttgatagagaatatcaaaattattttgtatgtattcagtcagctcattttttaaaagaaaatgttttaatatcactggctatggtttttattttattttattttattttattttattttattttttgagacagagtctcactcagttacccaggctggagtgtagtggcgcaatctcggctcactgcaacctccacctcctgggtttaagcaattctcatgcctcagcgtcccaagtagctggaattgcaggcacgcgctacaacacctggctaatttttgtatttttagtagagacggggtttcgccatgttggccaggctggtctcgaactcctggcctcacgtgatctgcccaccttggtctcccaaagtgctgagattacaggcatgagccactgtgcctgacctgactattgtttttaattttaactttaattttaagttcaggggtacatgtgcaggtttgttatgtaggtaaactcaggtgtcacaggggctggttgtacagattatttcatcatccaggtattaaatctattacccattagttatttttcctgatcctctccctcctcccaccctctgatgggccccagtgtgtgttgttcccctctatgtgtccgtgtgttcccatcatttagctcccacttataaaaaccactgtttcacagcttatttgtacttctctttatcaattaagaaaaagactgtttgtatagcaaactccgagagaggacgtgaggggtattttttggtgagacttgagcaaactgctttacgttgcaaggaaattcaattcattggaaactttttcctccaggactaaactggggcagctttcattttggctctctcacaaagaaaattgtccagggtctggaaaccacagttgttgaacctcatatgacgtctcttttctttcagctcatgcaacatttactagaggagactggtgtgatgtggcgtgtttttcctttccttttttttcctttccattttgctggctcgttggtgcacacttcctgagggcctgagagggctgtcttcctggaggaatttatgacagtcagcagggacaactgaaatttgagctggtgtgaacccataatccctcagggccctactggctggagtctctttagggagcatccttgctacccaaagatgcacacccattccccagcaccttcataaaacaacaacaaaatcttaccatggcattgccaagcatattttgcatacaaacttcccaggatggattctatctccatgggcagatggaatccatcccgaaagcatctttctctgccagcacactcacctgtctctgctctgcaaatgcccttcttggtagtagcttgttcaagggtacgcagagcaaatttggcaattctgaaatttcagcttttgtttgtgaacttcggctctgctcaggaagaacttgtcagaatgaaggttgacattcagcctgtatgtcgagcattcttgagagaagcacacggtgcctggcatcttgaatggcatcagctgcttgctacccagttctttgggacaagtgggtccatgagagaaaatatacagagcagggataagactgcacccgctctggcaggacagggagcctggctaccccaacttccttttcccaagccatctgctacttttcttcttctgcaaccaggcattcaaagcagggtgtatgtgggggaagaccctggaaatcacctccatctgggtgtacattgttacttttatcctcagtagttggtcaagaagtagagtgtattctctatatatctttattgggttcatccccacttattcagaagtagaatctctaggccgggcatggtggctcacacctgtaatcccagcactttgggagactgaagctggtggattgtctgagctcaggagtttgagaccagcctgggcaacatggcgaaaccctgtctctttcaaaaatacaaaaaattagtcgggtgtggtgggtgtgcctgtagtctcagctactctggaggctacgttgggaggatcacttgagcctgggaggcggaggttgtagtgagctgagactgcaccactgcactctagcctgggtgaggctttgtttgagacccagtctcaaaaaaaggaaaaagtttttagaaagttttagaaatactaatttttaaaaaagaagaatctctagcgaccgttcagtgtgatctggagttaggctgttctggttaaacgtagattgtgcctatcgaataataatttctcttaccctgcctagctctacagtcgcctctatacttgtctcaatgacccctgcactgtgagcttcttgaggccaggacctgacgatacagcactaaccattgtattttgcctgtggtgccttcagtacagtgccttctatgtgccggccctgagccaggcatcgatgaaagatgaataagtccaagtcatgacctcaaaggtggcttatagattgatgggacttgcaggccagtaaataccataagtatttgtggggtgacatcactgcacattaagttactcattgggcttactgtcatcacgacctggtgctgagaaggcacatttgaactccggtaggtgcagcagatgaatcactggggcctgagcgatgcctcccagggcactggcctgggcagagggtgaagtggggagatttgcacttaggcgactgtgtcttgagttgagctttatctcctgggtcacattccaggctcagctgccagtcaatgtgttatctggtgatggggagggtaacagggctcttcactcttggccacctactgggagcagtgggtaaaaatgcaggtatgagagtcagaccaacttggggtttaaatccctgttctgccaccactcattaatcccctgactgtgcacttgtcacttaacctccctgagcctcagcttcctcatctacaagtggagggtaacagtgcctatcttctttattttctgaacctaattgaatgccagatatatctgtcatgcatatgatctgacaatggaacagaatatttgcatcaggagacaaaagagactccaggctgtatgattgccatattttcaaggccactcctggtttgggggaagaagatggcaggacatcagaatggggtgccctgccactatcttcttttctagacccttggcagatggtctctcaggctcacataaccctagagacagagttctcaaatttgttgtgcttaagaatcacttgtagcaattacaaatgcagattcctgggccttaatcccagagattctgattccctgggtctagggtacagctggagtgcagtggtgcgaccacagctcgctgcagcctctgcctctcaagttcaagcgattctcctgcctcagcctcccgagtagctgggattacaggtgcccgccaccatgcctgctaatttttgtgtttttagtagaggcagggtttcactatgttggccaggctggtctcgaactcttgacctcaagtgatccacccacctcggcctcccaaagtgctgggattacaggcatgagccacggtgcccagccgtccccacctctttctgatgttatcgagctgtcgagtatcccagctgcaacctgttctttattgtgtctctgctgaccagcgttcccagcccattccagctcatggcagggtatctgcaatctttctcttccctgccctcccaaccccccacccacaagctttacctggaagctcatgtacacaccaaagggaataagcaaggacccagacaggcagccaggtgcctggcactaggccgggtactagggattcatagaagatactgcttgtggccaggtagctgcatgtgtgagatactggtggaagacactcagacagaggtaagcagggagtgttggggctcagaggaaggccactgaggccagtggagaatggcccattaaggaaaggttttcaaaataggtgaccacagggctgagtcttaagctgaacagggagcagagggcatgcctagcagagagggcgctgtgtagggactacagacaggcagtgtgacattgtataaggtatagggcagggagtggtggctggtggagaaggctgagttcatgagttcattctcccctgaacatcagcaaccttgccattagtgacccttgggatggtggcttttgaagaaattgctttgatggaatagctccccaagactcatggatactgggagtttatgtatgtatgtatgtatttatttatgagacagagttttgctctgttgcccaggctgtagtgtaggggcgtgatctcgactcactgcaacctctgctttccatgttcaagtgattctcctgcctcagcctcctgagtagctgggattagaggggcacgccaccatgcctggctaatttttgcatttttagtagagatggggttttgccatattggccaggctggtcttgaactcctgacctcagatgatctgcccacctcagcctcccaaagtgctgagattataggcgtgagccactgcacccagcccgatactaggagtttaaagctgtcatttctggttcttgggactcagatcaatgaaactcactaaaatattcattcatgggaaagttctggtagaaaggggaagattaaagtccatttttgtcaggagagtctctctctgggaaagtcattgatgagatgactggggcataaggtggtgtggtggtgtgtgcctgtagtcccagctactctggaggctaacttgggaggatcacttgagcctgggaggcggagtgattgggagtaattggaaagtgacatctggaagacaaatcggtttattttcataagctccctccagtctatgggtgatgggaaattggggtgctgtgtcaagaggaatcctgtggttggactttgattctgagaccaggactgattaggggtgtcggtcacagatgccagggctggggacatgggggtgacatgcaaggcttggacttgccatcctggctccatattttatcatgggaccagctgtctcccttcctttggtttatgcagttgatttcgaaccctacgtgcagggcttgacatttttaccaattacacttcatcttactagtttctactcattattccatccctcagaaaccctttctgggcctgtctgtgttactcagcttattaacagttcctcccagcatcgtatgcagtggtgtagggagaaccataaatgcctccagaatttgcaaaaatgtttggaaaatgttaccaagtgggaaatgatttgctaatgagttcacaatatgtcttagacccattaagtaatccagggtgtctccctaatatagtagaagcaagttttcagaatattccccagcggttttttcagaaaatgtgaatagagcacgactgagtcaaagaaagccctagctcatcaactgcattctacagtgtcaggcctcatgtgatgccgcagctggcgactgactaataagggaattggagaggggaaaattgattatttcctggacaaggaccatggtgccttaatcaagtgccctaaatgcaggggactgcaggggaagtcgcactgtggtaaaaaaaaacaaatatagtctaaattacatctgaagtagcctttcaattacccttaagcactgagagctggtcacagtctggaggcacacagggacagaagcacctgaggaggctcaggggccgcatctcaggtgtctgtggacatgcccctgagggagcacagtggtgggtgggatcccactgctgtgtcgcacggtcgtctttgctctcagtccatctgtctctctgtctctctttgacaagcccatgtagttcaagtctcataaataaaatgcgtacagccggggttcccaagccccatgctgtggaccgatctcagtccgtggcctgttaggaaccaggccgcacagcaggaaatgaatggcaggtgagcattaccacctgagctccacctcctgtgagatcagtggcgacattccgttctcacacaagcgcaaaccctattgtgaattgtgcatgcaagggatctaggttgcacactccttatgaaaatctaactaatgcctgatgatctgaggtgaaacagtccccctcttccccactctgtccctggaacatttgtcttccattaaaccagtgcctggtaccaaaaaggttggggactgctggcttatcggatgcaatttccttgtattctgatgtgctagttttatattcttatagtggaggatccataccgctttcacggttttatgagaaatatctcttacaatctttctatttgttttgctctgaccccatgcccacctggcagccctccgtcatgagtgcagttttacctggaagctcatgtgctgacccttcacatagccagccttgtctgcctgcccttatttctcactgaaaaagaatgttagcctttatagtcagacggtgtctcatatgattagctagtttacctttattcattttttcagacgtgggtaaaattgagtacttcaatctttgtcgcagagcaccaggctctaagaccaggttggtagaaggattctatttcatgtgccagttctgacaaattgtttattggtactcaaagtgccatgttgaaaggatccaggctgagggggacagggccagaattgattaacaatgtctgccagggactgaaaaaaatggcattgttaagcttgccttagagcctgagacagtcaaccattccctctctcctctaccaaaaggtagtcaaccactccctcactgtccttctctctctcagcatgtatcattagagacctccttccagactggcttgatctgtttatatttatcaacaacagcacactgtatctttttggtctgcctgcttcattgtatcccgttattgtgtccttttcacagtcaggagtcttttccttcctctgtatccccaggccctggcatacaataggtatgttgaatgactggctcacaacctaagagttctacctaattgttctgcatgcagggaatctgccttattagggtcagtcgtttgccttgctgagatccatactacagagttccgtggatcctcttggtctgttccatctaggaataaaacgtacattttgcatgcccttttttttttctttcttaaactcctgctagctcattacgatcatggcttgctgtctctctctctctgttcttctctcatcataaaacagcttcaacttttctccccagtgtccctttgaaactgttggtgagctagttttttctctgtccctttaggaaattttaatcatgtttttaatcatgcttcatagtgttttgggtcacccttcggtaatttttaaaatcctctggttattcctagttctaagaacaattttagctcttggcttactgctactctgtccagcattacccttgtcataattgttggtgatttcaagatccacatgaatcatgaatcatcctttaatagctttgagattcttttctccaatattcttgtcttccaccagatctcagccactcacttctctctctctctctctctctgtctctctttttttttgagacggagccttgctttgttgcccagattggagtatagtggcacaatctcggctcactgctatgtctagcctcccaggttcaagcgattctcctgcctcagcctcccaagtagctgggataacaggcacctgccaccacggccggctaatatttgtatttttagtagagacggggtttcaccatattggccaggctgatctcaaactcctaacctcaggtgatccaaccgccttggcctcccaaagtgcggggattacaggcatgagctactgttcccagctagatttcagccaccttcttctcttatcttgaccctataattacagtaactttaatcctgccataatctcagtttaaacctcctatcttcccagcttacctgtactagtattccaactccaacaattctgtgaccttatctggacttccagttaattgatcctgctattttttcactgtctttcacctcaattcctctatttcctgcttccccagctttaattctatagggaatcactatagtcactgtcaactacctttgcccctttcctgattcatcgttctcgtttggccacatgataacccttgttaaattcaacttttaccagccttccccccatatctgtgtagctgaatgtggctgtagcaaaacatgcaaccacctggattggtctcatgtaaatttcataattgcagcctttaagtaggcctttaatgtggcctggaaatcatactctagttccctaatcccttcactcttccactgtcctagaaactgttacagttttttttcacttgtgttattacatttttcatggttctcttgttaagtgcccacaaaccatctgctcgtgggaactttgctgggaattgatatggaacatcacattttctgaaatcaattttcctgggtatttgactactgtccagactgtagtccttctattccccacagcccctcaaagatcggtgacctctctctttccgtcacacctgtcccgtccttcattctccccctggcccttgaccgtactgaactctccgtaagcgcttgtcgaggagtaagaatgggaaccatcagtggcttgacttactgggctgctgctatccaggcaggcaacatctgttttcatcatattattaagtgtttttttttttttcagcacttggcaggaggtaggcaagtttgggccatagctttcaggccctgagtccaggcaaggaaagaactgaccccagagagccaatccagccctggtgcatcttgagtattctggaaatggcagatctaaaaggacaaaatcatttcatattcatcatgagtatagcttggtggttaagagtgcagactacggagccatcacgatgggttcagatcccagctcctctacttcctagtgataaaagaaaaaactcaaccaaattaaatttaaaggagtttaactgagcaatgaacaatttgtgaatcgggcagcacccagaatcacagcagattcacagagactccagtacagccacgtggtggaagatttatagacaaaaaaagggaaatgatgtacagaaatcaaaagtgaggtacacagcgggtggattggctacaggctggcatttgtcttatttgaacacagtttgaacactcagtagtgtatgaatggttgaagtacggccgctgggattggccaagactcagctattgttacaggtgcatactcctaagttaggttttcaatcttgtgtacttataagcttggttgcagtttttccacaaagactgaaatatagaagcatggagtcattctcaggccatatatacttcacttttatactagataggagaactcaagcaagttatctaacctctctagactcactgtcctcatctattaaagaacagtaacaacacctactttctaaggtgtgttctttcctactttctaaggtgtgtgtgaagaataaacaagccaacacctgtaaaccattcagaacaaggcctggcactaattaagtgctcagtaaatattagctataaattacgattattttctcttttgagtctcacaacagtattgtaaggtattattatccctattttgcagaggaagagactgagggtcacacaggttaaggagaggctcaagatcatttggacagaaagtggcagaggctgggcttgcatgggatcataggactctaatactgtttcacttaggatttcagagccccctttggtctccagatgaaatgattttacccttgtcatggagattcatattcattccttctccaaatgtgtcctaacttccccatgcagatggcaccaaatatttacagtatgattacacggccatgattgaatttagccagaacgggagagaggctgattagtgacaaggctgcaatcttgagaggaggaaatagttctgacgttgcacattgtcattctgctggagtaggaatgttgcttaaaattgtcctggctcagttccctttctctggaagagtaaaagacacgcatttgcccaatacatggactttggagtcaagctgacagtactggaagagctgttaacagagtccagattatcactttatggttagagggatgatgttttattatgggcccacaaactgtcctccaactgtggctgaaaaccctgtcatgagaggccagaaggaagatcattgtatgttcttctcccaggccaaggagacaggatgtccttcatcagaaccagttgtcagcataagaagaacacacaccaaggaaatccatttcctggaaacatctctcaacagttcccatgtggagaaactgtgaagcttttcacagcaaatgttttagagtgttcccaggtatttgcaaagctcctatcataatgctggctgtactgataatttcctaagggtgcctgccatgagacgatggaaagggcatcaggtctgaccatggtgagccatgagggccttgcagagatagagtcaactctctgggcctcagttttcctttctataaaatgagtgacttggactctgttgggacccctctgcctctaagattctactagtctgtgattccatgagtcaaacttcagaagtggttatggtccctcataaaatggcaaagatttgggtcctagaatctatgactccattagcaggaccacatctcctctagaacattttggcttcgtgcttgtcatcatctttttgtactaactgctctgattcaatctctttccctgaagacttgcttccaccagaattccatttaattccacagatgttgaatgaagactttctgtgtttccaactgcatgcctacaaagataaatgagactagtttcctaaccttggggaattcccagtgagatagcaaggtcaagactttatagaacttcttttctccagagagctctctatttctttgacctgtgtgtgtccctagaccagtaatattgacttcaccagggagcttgttagaaatggaaacctacagaatcagaagctctggggttgtggtgcactggtcttagttttgttctgttttgttttgtttttgtttttgtttttgttttcgtttttgagatggagttccactcttgttgcccaggctgcagtgcaatggcatgatcttggctcacagcaacctccagctcccaggttcaagcgattctcctgcctcagcctcctgaatagctgagattatgggcatgcaccaccacacccagctaattttgtattattattattatttttttttttagtagagatggggtttctccatgttgatcaggctggtcttgaactcccaacctcaggtgatctgcctgcctcggcctcccaaagtgctgggattacaggcatgagccactgtgcatttggcctggtcttagtttttaacaagtcctctagagagttgagatgcacacttgagtttgagaaccattgaactagccctttcagggacaagctatgagactgtggttctgagccctcaagggacccaaggacacattttgaagaaaattcagttacttgggctgccaggacttggtgttttcaactcagaattacagctttcttggaacctccaacaacattttgaacctttgtggcgtttttgtacatgtgcaggtgttgtggaaactacccatttgttttgaagggaaagaatccagtttagcacacaattctccatggaacttccaggcttccctttaaattgattgtgatgcttggatagatattgacaccatgactaagacccataataaaggcccaatccaaggaggctctgctacttccaaagatctccaaaggaagagagttctcagagtgcgagtcttgtgtgaatttccctcccttcaaaggtgccttaattaatatcctcctccatggcagggtctaagcctggcccctcttctcagcaggtaaagattattgggtcacactctccctgcagtaagttcagacatgaagggtcgggcaggtgtggctcttggagagggcctgcctgggtcttgggaatgctcccccttgtcctccttcctgggatctgcagatccatcatctactgccccaacccagggctatatgctaaaccacaggagccttcatgaaaattagaaaagcactcctgcctttttttttttttttttttttctgagatggagtcttgcactgtcacctgggctggagtgcagtggcgccatctcagctcactgcaacctccgcctcctgggttcaagtgattctcccgcctcagcctcccaagtagctgggactacaggtgcgtgccaccatgcctgactaattttttgtatttttagtagatttggcgcttcaccatgttagccaagatggtctcaatctcctgaccttgtgatcctcccgcctcggcctcccaaagtgctgggattacaggcgtgagccactgcacctggctgaaaagcaccccccttaaggtgcctcttagggtggctcagcccctggggctcagggcttggctggattccagttcctctcacctccttgagcaggtgcctgtgtgcagcaccaaccacatagccatagctgtaaccctgcccctacccagcctggggctggacatgagtgagggctgatggaggggtggggagagcctgtacatgcagccagcacacgtcgggagttcccaagtgctggatccttcattacatcatttccttaaattcttacagctgcccaacgaggtggatattggttgcacctctgtatatttttttctttttctaaattatgaaagatttcaaactctcagtgctcccatgttctcatctatgcaatgggtatgatgcttcttgatcctttctcaaaaacttgttctgaaaatcaaatcacaccaagtgacaaagtgctctggaaatgttaggtttcatatagatcttatcgctgaaccctcaaaggctcactttctggggcctctgttttgagacactcaccctggactcacccagccctcagcgttatgcatgggtatgtcagaacgttggtttcttgccaggctactggtatttgtgggtgcctcctcccctaaaatcattagacttgtgaggcggcaaggatgagttgtgtgtgcaggcactcagggacgagtcacagcctggcaagctggcctggacaggatgacttcacgggcctttcccacttctcatttttatgactagctttactgtttcattttggctttctctctctttcttgcagctgtggtgattaggatttagggcaagcatttgggatcccttttctaatccctttcaaatcctgattcagctgcaaagtccgggaagggagtagagaatgggggaggagggactcaccctggtgaaaggcagtagctcagaatatccgagaaactcccaacaggaatgcccagcctccacccactaaagctggagacctctcatctcatccaatatcaccctcgtactagaaacgcaaaagggatgagtttgtctatggactcaaacctttacagtcttcttgcttagaagcttaaggcataattatggtagtcatggtggtaagggacttaacatttgcctttttccaatttaactgtgtcctttgttgaaatatttcttagtcaggtccccttttctctatttccactactgtcctaggattagatctgagtccccctctcaatgagattagtccagaaattatgtataccatccatcttgcaaaccactgccagactctgttgacttttcattatgtaacttccctatgggagaggtgagttacataatatgatgctaagatgcccctcactggtggcatcatgtacatatttctcagtctgaaaggaaaggtctttttaaactggcttcaggccatctgtccaactaattcctgcctgcaactcctagtataccctctactacaaggtctcatcacttattctgttacccaccacattcattccgtcttgggctttggttcatgtgatccactccatgtgctccttctctctaatccaaacaccatgcatctataaggtcagctcacgtcccatttccttgaccccagcccattcatatccctattctcttagcagctattgtcaggatgacacagttttcatgccagttattctttcatggttttattagttaattctccccaggtagattagaagctccttaactttggaccctgtcctaagcttctgttatattctctgcagtgcccagccaagcttatgtgtcatgcagtaaagaataaaataattttgaccctgatcaggtgtttggttacataaaaactgcattggcaactttctagaaactaatatattcatttatcttgcaaaaaggattgctatctgattatagccagtagtcatgatcttccagccatgcacaaatatacccttataactttcatgagtggggaggaaaattgatgaaggaggtttcaaaggtgatcatcagccccaggatttccaacaatagccagtctgccctgggtccttaactctcttttaatgtttttattcttatttttatttttttaatgcagtctcactcttgttgcccaggctggagttcaatggcactctcttggctcactgcaacctgtgcttgctggattcaagtgattctcctacctcagcctctcaagtagctgggaatacaggtgccgccaccacacccggctaatttttgtatttttagtagagacagggttttacagtgttgaccaggctggtcttgaattcctgacctcaggtgatccacccgccttccaaagtgctgggattacaggtgtgagccaccacacctggcctctcttctaatgtatttgacctctcctctttccccagagagttcctgtgagaacaagcgggcagacctggttttcatcattgacagctctcgcagtgtcaacacccatgactatgcaaaggtcaaggagttcatcgtggacatcttgcaattcttggacattggtcctgatgtcacccgagtgggcctgctccaatatggcagcactgtcaagaatgagttctccctcaagaccttcaagaggaagtccgaggtggagcgtgctgtcaagaggatgcggcatctgtccacgggcaccatgaccgggctggccatccagtatgccctgaacatcgcattctcagaagcagagggggcccggcccctgagggagaatgtgccacgggtcataatgatcgtgacagatgggagacctcaggactccgtggccgaggtggctgctaaggcacgggacacgggcatcctaatctttgccattggtgtgggccaggtagacttcaacaccttgaagtccattgggagtgagccccatgaggaccatgtcttccttgtggccaatttcagccagattgagacgctgacctccgtgttccagaagaagttgtgcagtaagtcctgctcctttgtcactcttctagaggaaccactagaattcattcattcatcttcaagtgttcattctgtgttactatgtcccaggtactgtgctggcaataggttttcaacaaaggccaagataaacacaacgtgctccaggggcttacactttggccaagagacacatgtttttatttatttatcttttagagacagggtcatgctctgtcacccaggctgtagtgcagtggcatgatcacagctcactgtaacctcaaactcctgggcttaggtgatcctcttgccttagcctcatgagtagctgggactacaggtgtgcaccaccatgcctggcttattttttaactatttgtagagacaacgtttcgccatgttgcccaggctgatctgaaactcctggcttcaagcgatcctcctgcctcaacctcccaaagtgctgggattataggcatgagcacccagctaagacagacattaaatatataattatacaaataagtaactatagttgtcacagtgtaatggaggaagaattcaggacatgaaggagtgtgcaaccccaggaccttatctaggcctggatgctcagggagattgccctggggaagggacacgtaagcccaaaccacagaatgaggaagagtagatagacagagtttttcttcagcacatggagctgccctggaattccctaagttggaattcatgagttggagtacggataggaatggaagggcagaaaaagtaacataatctctccttggatggtgtggaataccaaggcatttttgccccatggtggtgctggcaggggatgttttctcagctgacaaagaggtccagcgtatacagaggaccaaggtgtggtcctggcagctccccacctgttaagattgtaggggccactcctcacctgccaactctttctgcaggaagatgcctctcggagcccctgagctgcattcttctatgttggaagctttctttcctcttttgctttctaaccctcttttcacagggcttctctctcccttccttcccacgcactttccagttatctctacccctgctgctgcccccactcttctcagcaggtcagcctgcattctccccagtttcctgcctctgcggctgcctttttgttccttcctcctccgggagggcagggggccagccgcccaatccaggaaactcgcatcctgatttggtaaacaatgtcccaccctgacttgtccattcccagtggtccctgtcccctccagctaccatgaatctttggtggggaaataaagggaaataatctatttttaaatatctatttgtaaattatctatatgtaaatatctatttgtaaaatgtaaaatatcttcctagagcagagtggagaatgagctttagagccagactcagcaccaactccccaggagagggcacccaggagggggttctcagaatgtgacatattctagacctctaagatatagcccccagcgaagaacaatgtgcttttgatgtgtattaaacaaaatcccctgctgagaactaacttcaaaaagcacagagatctcatttgttcttgactccagaatcaaaagatttacttaagaaatcaatgccatgaagaaaaaaagaacctttttccttgccatgccacttggaaagtgttcagaagtgccatttccctggcactgcagaggctgtgttgttgtggtgtgttgtggcctaagtcagctggaacacttcaatcagcagaacacactgcaaacattttcaaggtttatgactttaaatgacttctgcagaatttatgtttcccctttcctgaaaatattaaaagggaaattggttctgtaaccattttgacagcttattcatttgtgttggaaaattttaatggaggggttctttttataagccttctgtatttatcagaaaatggaaagataacatgataaggctgaggagctacacaatgggactgaccgcccccctccccccacccccgcaatcctggtgtcgaataggatataccaatgtggacttgtctgtggaaaaaccatctctgtgtgctttctggcaaggcagcaaaatgaaaaggcagtttggacttttcctcccttcatcttctttgttataatctggaagctctaagaaaacattagcgttatcccgcttgttcctgtgcctgagaaatgaatcccctgtgagtccccccatccactctgcaggagacagggctgctgtctctcactgcactgcactgcccggctttgctcagcagactcagcagccgtcttgaaaggctgaagaggccccagggcctctttatcaacttcatggtaaagactgtagtaactaacatttataaagcactttcccttatgttatcgcagaaagccccaggaggcaggcagcacactcttgccactctctttttacaggttaaggaacttgctaagtgaatcacctgaaaaacaaatagccaagagatagttggatgctaattccaaacctcttgctcatttcactcctctgcatgttgggaattacaaattcctcttttaaggtaaaccattttctggtggccacctccacagtccagcctggccaggtaaacctactttgcaattggcattcacctaaaataggtgaaactctgaaggcagccttcgtaggaggaagaggagctgactctagttgtacaatcttgagcaaatcctttgtgctctctgagcctcagttgcctcatctgtaaaatggggattttatatgcagaaagtagatgagtgaacaggtgttgtaaatggtagagccctattcagtgtgcactgtgttatgtattattacaatcaaatacactgaggaccgatgggctaggcagatggcctcagttttgatctgcactcaaatgatcagacaaaaatggtgagcattttccaagttgcagatgacatctctgaggtttgggaagtctcatttgttccttaaacattcattgaacctgtaaaccaaaaagtatctgagacaagtcccaatcaatgtaaaagtttattttgccaaggttaaggacatgcctggagaaaaggaacacaaaatcacaggaacaatctgtggtctgtgcctttttccaaagatgattttgagagcttcagtatttaaaagggagagagggagggcatggtcacattactgaatccacatgttgcaagagaaaaggagcaggtaggggaacagtcaattatgtattcctctagtgctcagtaaatcaacactttacataagataaggtgaacatagagtagctacttatgcagatatttaaccttttatctgtagctatctgcttaggaacaaaagcaaaggcagtttcttgcattactcagcttttagcttaatttttttccttttggcatagtgatttgggatcctgagattttattttcctttcacaaactgtaccccaataatagctaatcttgtcctgtgctaggtactttcaaatacagtattccacttaatacttaaaatagccgtttgagataggtactatcattatcttttttttttctttctaagagataaggtctcactatgttgtccaggctggcctcgaactcctgggctcaagcaaccctctcacatcagcctcccaagtagctgggactacatgtcactatacctggctctattatccctattttacacaactggaaattgtcagggtctgcctgggggctccaggagagctttaaagatgaggtgatactaataatcactaacatttcttgatattaatgtatgcatgtgttgtttcaggctattagtgtatgttaactcactttattcacacaacaaacctgtcaagtagatgctcttatagttcccattttatggaagaggaaattgagaaccaaagaggttaaataacttgtccaaggtcacaaacctgtaagtgctggagcttgtttttttgtttttatttgtttgttttattttgttttttgagatagggtctcactctgtcacccaggctagagtgcagtggcatgatcatagctcactaccgcctcaaagttccatctcagcttggactacaggtgtgcgccgccatgactgaataatttttactttttaaaaaagaaacaatgtcttactatgttgcctaggctggtcttgaactcctgggctcaagcagctctcctgcctctgcctcccaaagtgctgggactacagacatgagccactgtgcctggcctgtaagtggtagagttgagacgtgagcctaggcattctgcaggcagaactgaaaatcaatgctacatctgcagattgggacaggttctgtctgggtgtgatcaaggcaggacctttatcatacagtgaggaattgattagactctgcagccagacctcgctgggtgagagtcctggcttttttctctttggctgtctggctgtacaatcttgagcacagtggaggctttatacttgcaggcagggacttcccataccagccacagcaaggggaatcctgaggttgcattctcaggccacccttgagaccaccagggagaggccaggtgccctgtgaattgaggtcctgtctacaagatgaccaaaccccacacatcctggagtctgccatttttgccacccagtaagagaaaacatggaatctatgggctgaaaacgctgtccccagtgttctggtgattcttgccacctgggcgagattgcttttaattaacctctaggtgctgactttatcagcctcatctggtattttggagcagggagccaggctgttcctaccctaatagccccaccccacccaggccaggcacaatttaaggccctaatagtattcctaggacacacccttcatgaactggcctgggcagtctacactgatggcacccctttgaggtcctgatgtgaagtggggaggctggactgacttcacaaacgttgagtctactgtgcccagtaatacaagacctccagcccacctccctacactgaccactcctttagtcattcatacaatcattaaaaaaaggactgttcttatttcctagtcaacaaatccaatcccaccaatgacttaggctgctgattagttattcctccccgctgaacacaaggccttggctgagtgtaaacccagagggccttctgagaaatgaggctcataggactgtttccagcaggccggtggaggaggcaaggctgtggtctccccttggctctcaccgcaaaggcccatcccacagagggcaaggcatgaggcctggatgctctgaaagtcactcagcactcacccacagcattctacagatgggaaagttttattctagtttagtgaaggtgtttgagattcttttggttgaaagtgtcaggaattccatttttttctaaaaggaggggggagtgcattatattatctatggaaataaggatggcagttgtgagagtcctgctttcactgcatctcccctccactcctctccttctccagtccacagtcaggaagcatggccccaccagcccctgaggctcacttgttctcagtttgagcctccttttattcagttctggttcctaaatgccagtaaaggactctgattgtcaaaccctgtaccaaccaacagtggccaggagtgagactacctcagaccaccacggcagctccccgatgcaaggtgtctggagtgagaaggaagggcagtttctagaaaaaccaggtaccagattaaataataggtgtctgtactgaggtccctagaggctgtccatgcctttactctacaggtaaagaaatagcctacaagagctacctgatttcccagaacttccctcacttgttcgaggtagaggggaactagagcacagtcttctagctcccaatccagtgccttttccattacaccaagttataatcttttttagttccagtttctcttatggcacatggccaaaataagccttagtaacaagctgtcattctgaaacccaatgcaatagttcttttaattccccctccccactaacttttttttttttttttttttttttgagatggagtcactctctgtcacccaggctggagtgcagtggcacgacctcagctcactgcaacctctgcctcccggtttcaagcaattctcctgcctcagcctcccaagtagctgagcccaccaccatgcctagcttatctttatgtttttagtagagatgggattttgccatgttggccaggctggtttcaaactcctggactcaagtgatctgctcacctcagcctcccaaagtgctggtattacaggcatgagccaccatgcctggcctaatttccgcaattgataggtgaagaaagtggagttcagagaaaccaagtcatttgcacaaggtcatagggagtggcgaagctgagccttcaggtggtctatttccggtagccatcctctccccacgatgctgcctgctgcccgccagatattttctctgcctcacatctcctgtcttcttattttgtctgttagggtctcaccaagaagacaggcaccaggtacatcacttgggcctcccactcatgacagtgggtgactgccgtgtagttggttgcctacacactacacttccttaattatggagagagacagtgacatgctgtgagtgccttagaaatgtcctctgcccgtgggtaatttgactccagcagtccaggaaaagaagagagtctttcaggatgcaaagcaaatgcaaattaaaagtgggataatgattacccctcaccatacgattgtcaaaacttgaagtttgataacaccaagtactgaagttttgaggggatgggaatcgttaggaccatcgttgctgacatgagctgtcttggaaggcaatcaggccatatctgtttaaagtgagacccagtcctagagaaaacatcgtacatgaattcaaggggacgtgttcaggaatgttcatcacaacactgtgaaagtgaaaacttggaaaccacccaaatgcttaccaatggggaaatggccaaataaaatgaggaaagtcatatgaccaatggataaaacaattgggagggataaactagatctaaggttttgattaaatctttaaatctaaaatacagctagttttcattattcacaataattatgttttataaagtcactgcaaacactgagttagagaatactaaaccattgctccatatattcctgatggaatatagggttaggttcctgcaatcctctggtgacaatattttttgtcaactaatcaatacatagccttgttttatgtgtgtttctgtttaaaaacatcttattttttgtttgtttgtttattttttgagacagagtctcgctgtgtctgcagtggcacaatctcagctcactgcaacctctgcctcccggtttcaagcaattctcccgcctcagcctcccgagtagctgggattacaggcacctgccaccattcctgactactttttgtattttttttttttagtagagacagggtttcaccatgttggccaggctggtcttaaactcctgacctcaactgatccacccaccttggcctcccaaagtgctgagattacaggtgtgagccaccatgcctggccgaaaacatcgtatttgatatataccattgattcattaacatcagacccacagccaacggtaactcctgactgaatgaaacttacctaacacatgttttccctgtaaggcacatcgcagcctttctgcactgaggaacactagacggcgcatcaccattttaaaccgcaaaatcacttacagaaagcacagaaatgaaaaaacaaacaaacaaacaaaaaaaccacggtgctaagtagactgtgaaaaggatgcttgttcacagaatgaaagctgaaaaagaaggcagagtggctccttgttcaacctcagctgagaacatctgcaccaggcaacacatttttttgtagtctcagctacttgggaggctgaggctgaggcaggaggatcactggagccccggagattgaggctgcagcaagctgtgactgtgccactgtactccagcctaggtgacagagcaagagcctgtctcacaaaataaactaaatttagagatattttaaattgagtgctcatgcactctgagcatgtccactagtgaccgtgaaaacgctgtgagtattggtttgggcttacaaatacattttagtgagtaggcaaattcacaaatatggaatctgtgaagaatgaggatcaactgaacatgtcttcacagtttgatatctctgaaactggggtgcattttagattccatgaaatacagtacatgtatcaacattgatagaatctgtgattaacgttgagtgaaaactgaggtgaaggtcaatgtatataggatgaacctacagatgtaaaataagacaaaatgccaccataattctcctttgctataaaatggttagcaggtatcttcagcattccccaggcactattctcaacactctaccatctccattaatttaacctttttgaggttcttatgaggtaggtgctatttttattctcatgtcttataaagaagttaagaaaattgcacaaagggctgggtgtggtggctcatgtctgtgatcctaacactttgggaggctgatgtaggagaatcgcttcagctcaggagtttgagaccagcctgggcaacatagtaagacatcatctctatttttaaaaatgagaaaacttctattttatttaaaaataatgataacaataaaagaaacttgtacaaggtcacaaaaaaagctgtttgtttcaccctgaagtaaaaatgactgattggatctacaaactttcctagtgatatttgtatcctaacaggaaccaaaacacagacaatcaaactcagaacagtacattctaaattgtattgttgtgaaatgaaacagctttacttccctagttcatttattgcccaccatatttcttactccaatgtaaagagacataaacttcagatggatttaatcacagctgagttttcacaagtgctggattaatggaattgttctaagcttttgagagctccttttattttagcttcataaaaatatatttctacatatagacatcttttttgtttatgagaacacttgcataacttgttatgtttgtactgttgcttgttaattttaaatacaatcaagttacattgagtaaagtcataaattaggacattaaaaaaagagaatttttatgagctacagacagacttatgcaggaaccaatgtaccagaaagctgaggtacttcaagaactaaatgcagagggcaggcgtggtggcttatgcctgtaatcccagcactttgggaggccaaactgggaggattgcttgagcccaggagtttgagaccagcctgggcaacatagtgaaaccctgtctctacaaaaaaaattttaaaaattagccgggcatggtggcacacgcccatagtcccagctactcaggaagctgaggtgggaggatggctttagcccaggagtttgaggctgcagtgagccatgattgtgccactgctctccagcctggaagacagagcaagaccttgtctcaaaaaaaaaaaaaaaaaaaaagaaagaaagaaaagatgctaaataggtatcttaaattgagacataaagattacagaaacatgaaacgtgtgagtgcattttttactccaaaattgtgtgtatacttttgcatattaaaaatttacgttactcttgaaacatgattttgagaaactgttggttctttaacacattcttgcttatttaatagcttttcctccagccccattgctgcttcctaaaaatccacacttaagtcaaagtcccctctgatgctggcaaacttttctgattccccagcccaccacatgggtattattaagttgaattggaaatttcttgcttttttttgtagatcaaaaccaatcaagtatcagcaatttcatatagttcagcctaacactgtttctctttgattttccatggccctttatctggccctgtcttgtccaccttggactgtgagcccccttgagggtagggactgcagcttatttctctgagtcctgcccagaggagagagtaggcactgaataaatgcttgctggctggaatggagtgagaaagggcatcactgttgacttaccttcctgtgtcttccctttcagcggcccacatgtgcagcaccctggagcataactgtgcccacttctgcatcaacatccctggctcatacgtctgcaggtgcaaacaaggctacattctcaactcggatcagacgacttgcagaagtaagattgctttgctgatgtatttgtggtttcttcctattccctcatcctctcccttcttttatctgggctcattttattcatctgtgatgcctcacccaccccagttatcatcccttggggacagaaataaagtttggtattttctgttgaccccatcacagtgcctagtccagagctgggcacatagtaggccatcaggaagagttggagagataggtagaagcaccatctcagaaatagcctctttggatgtgtgaactggtctcctttacttccaagcttgttctttagcagggactactgaagagccttttcatccactgtctttattaactgtaccctaaggaactgtttccatattttattatcttctataaagtgtggatttaggaagagttgttaacctcggctgggagtgattattcaagttctgttttagaggggtgcagggacccagttgctttggtgtgggacactttataggtgtcctagattttaaaaagggggtaaacagatgtaagatattagaactcgcattctcttttttggctaagtgccaaagactagacagtatactgatatttgagccagcacgaggtagtctaccccttaaaggacagaattactcatacactgagtaccgtgtccttactttttaaagttatggataaagccactgagttaacctacagatgaccaggctaccaaaaacaagtcatgaggaagaccagcccacatggaagcaaataaaactcagctaatctgacacttagttcgtgcagtgcataactgttgccatgtgtaattgttgcagtgtgtcattgttgcaatgtataattgttgttatacctcatggcaagcaattaagcattaatggaaagcagtttgcacaaatggctgtaattagtgtcacatttatagaggccaaccacctttttcatgtttcttctcactgtttttcagttttggggttgagtggttggctggagttctccctgcccctcaagattaggtaacatctacttgaccctccgcttctgtgtggcctgtggaaacccaaagccctctggactctgaatcgcaggggtggggtgggcggtatgtgttcttaggctcctctaagaccccaggatcccaagttgagtgcagcctgaatcatcctcatcttccggttgaagatctgacgcttcctcaaaatccataacaaaaactcactcccaccgaatactcatgggtttcatagagtttcctaaagaactgggggagcctgggaaaggtcatctcacacactgctcagcaaacaacctagagatctctttagacacccccctctagacacctccacctcttcaggtgttctacctccccacaaccatcctctggaggcacccttcctcctcttcaggcatcctcccctctgcccggatgcttctctgtcccatctcagcttcccaccatcttgcccactcccttcctgccctttctccttctccttctctgtctccttctccttctccttctccttctcctcctcctccacctcctcctcctcctccttcttcttcttttcctttgtttttttaagacagggtcttgctctgtcgtccaggctgtagtgcagtggcacaattatggctcactgtaccctcaaccttccgggttcaagcagtcctcccacctcagcctcctgagtatcagggaccacagctgcatgccaccatgcctggctaatttttgtagagatgaggttgctcaggctgctctcgaactcctgagctcaagtgctccatctgcctcaacccccaaagtgctgagatttacaggattgagccgctgtgcctggtgcccttctcttcttaggagcacaaggaattcctctccttgtctcatgtcccactgagtgactgggatctgggaatctgctgatatttattttccgtgggctggcctagccaagccagaggaattctgacaccagcaaataaaaaataaagtgttctttccctaattttatgagcaaggccttcccccacacagcagagtttgccagacccctgcctggtcctgccacaggccctgatgtcccccagatctcaagtactgctctggccttggattcctcctgcctagggatgtgccacaggagaatatgaagcagaccctgcctggacttcagacagactgaccagggggaggggcagggaggtccaggcggaggagggctaggagctcagggcaggctttctcaaacttcagtgactaagaatgagccaggaaactgacttctgggctcacccgcagagatgcagagtcaacaggtctggattttcaatgaaccgacgaatgactgccacactttgagattcactggcctcaggcagtgaggggtcccagggaagggcttagcagagctctgctgtcccgtctgacccagctctccagtcaccctgaagcagttaaaccatcttaaccttcagccagacttagcttaataaatgtgcagtgataaagaacagctctctctctttcagaaggggataatactaataactcttttgctttcccaaaattggtgtaccaggggccttggtggaagaacaaggccttcactgtctgcagatctgggcttgaacccgaccttatcacttaccaactatggctgtctcactctgagctggttatttaaacttcttgactctcagtttcctcgcccataagaggggacgggtggtaacaaatcaatacctgtctcactgattatgtccttgttaggccctgtttttggtctaggggacagttaaaagctgtgccaagtgaaggctgtgccatctactgacccctgctgatgagcagggacctgtgcctgccaacactgagagaaactcacagtgggcctggagaggaggcatgtactccacttctggaagctgtttccacttaatttccatgtcctgggcgtagctggataatctcccagatgaaaagccatgtgggtgacacctcctccccaaagcacctcttactctctaagaagtgcttgccattcattcttccatacaatcattgattggttcatttattttttcatttaacaattgtttttgagcataaaaatgtgccaggcagcatgcaaagtactggaaataaaatagtgaataacacagcaatattctttcttttttggagctcacatttttgcatgggagtgaatcaaataaacaaccagggtaattgcaaccaaaagtgactgcaatccacgtccacctcagtgtgcaacacatgaggtcaagcctaactatagccacttgttaggtgtttaccatgtgccaggagctttcctgagtgttttatatctgctgtctcatttaattctcacaatgagctcttaaagtgggttttatcactctcattttacagataagcaaaataaggaacaaaaagtttagacgatttacccaagctcacatggctagcaatgtgatcaaaccagaatccaaatcctgttatgtcctcgctcttggccatcatttgagactgtcccatgaccctagaggaccccgacatggcagcaggacaacccttcaatcagaaaaccttctccaagccgggaagacagataggttcctcagcccactaatccaggggagacttagaactaattcaggactaacattcaacagattgttacttccccaagtccactgctaattgctgtggtactgtcatcacacaaaataatagtgggagggcctcttcagcaactgccttcaaatacacacacacatacacactatagaaaaaaaaaaaaaatatatatatatatatataatctccccaccattgtatatttgtaatttgtgtggagagggaaagcagacacagttgatccacacattctttgaatggtgatggaccttggctattagacttctggcttcctctcttatggaacttcagaattctgtcccctcccagtgtcccagaggggtgatggttcttacagaatcaggttattacaaaacacctgaatcccatattcagacagcttggatcagcggttgagctgaaatcctacttgtctataatttccacttttatcctatttctgctatctgaagccatataccaaaaagttatttccttatccaaataaatagagaaagcccttcaattattatacagtgttattcccacacactgaccccattcctatcaattttctcttcttcaggggagaaacacatcttttgatgacctagttttgggtctcttcactgtccaggtaaccctcttctgggtggatattagttgtctaaaaagggcctttccattcgaagactagatcaaatgcattaaagaattttagcttccatcacttcttggccttttggctaagatcaaggtgtagaattttatcttccaagttgtgtctatatgggcaattttgaacatactggacctcaacattgtggattccttctgcctttcaaaaagtcttccctgtcaaataccattatatgagatatatgcaagagcatcagcataatactagaacaatggaattttatgttccttccttttcccatttaaaaaaaatggggggaaagaaaacctcatgaagtgtgcccgtcttcacatgctatttccccttatccttccccttcccagaattcctgtcctactaagaaagaactttatcttgtttctttttcttgatatattttcaaaataaggaattttccctttcttctggaacatttaatctatctggaagctgatgataatgcagcatttagaaaactccatttggcagaaaatgtagactttcttatccagcttaaattttttttcttctctcaagaacgataccaaatgcattttactgctttcattctttggaaatgttcccaacattatttttcccaagctacataagtgatttaatagatttatgttagagtttaaacaaggagcatgacccagaaaaaccactgaattattagagagagataactataaccaacattctttgtgaatttagatgtgaaaattcttaaaaatttagcaaatagaattcaacaatatatagaaagaacaatacatcaagaccaaatggagtttattccaagaatgcaagtttggtttaacattcaaaaatcaatcaatataattaatcatagtggcgaggtgtggtggctcatgcctgcaatcctagcactttgggagactgagttgggcgtatcacctgaggtcaggagtttgagaccaacctagctaacatggcaaaaccctgtctctactaaaaatacaaaaattaccctggtgtggtggtgcatgcctgtaatcccaattactcaggaggctgaggcaggagaatcacttgaacctgggaggtgtaggttgtgagccaagattgcaccactgcactccagcaacagagcgagactccgtctcaaaacaacaacaacaacaaaaagccactaaaactaataaatgagtttagcaatgttgcaagataaaaagtcaatatacttaaaaaattacttcattgtatttctgtacactggcaacaaaagtcagaaattgagattttaaaataccaggtataatggcatcaaaaatatgtaaattagggataaattttaaagatgtgtatgatttacacattgaaaaatataaaagatttctgagattaatttaaaaaaaacctaaataaatggagagatataccctatcatggattggaagacttaatatggccaagatgtcaattctttccaaattgatccatagattcaaagcaatccccttcaaaatcctagcagacctatttttttagaaatcgacaactgattttaaaatatacatgaacatgcaaaaaaactagaatagtcaaacccagtcagttctcattattcccagtagttatcatccataaaatatccataaacactaaattgcaaattctgaatcattgctcctagatgaaatacagagttgggttcctgagagcttccaatcacaacattcatcaatcaatacataaacttgtttgatgttctgtttaaacacacgtttttgagtatatactgttaattcattaacattgaaagctatcgttcatattttgaatgaagtacttaggaacaatagacagcagatcagcattactcttgggggccattttcaacagcaaaatctccaacaagaagtacaaaaaggcaaaaaatgtggcactgcatagaccacagaaaggatgcttgttcatgggatgagagctgaaataagaagacagaacgttgccttgtttgaccttacctgggaatatgtgtcctgggtgactcaaattttttgccactctgtgtatgtccatgaatggctgagaaagtgtcatgggtattgacttggggttacaagcaaattttagcaagtaggcagattcacaaatatggaatctgtgaatcatgcacattaaacaaagctttgaaaaagataaagttcatctttaaattttgtttaaactacctgatttcaagactaagtataaaacaacagtaatcaagacagtgtggcattggtataaagatgaacatatagagcaatggaacagaacagaatcgagaaataacccatatgtatgtggtgaaatgattttttgacggagtgggaaggcaattcaatgaggaaacaataatgtcttcaacaaatggtgttgcagcaattgaactgccatgtgcaaaaaagcaagcaaacaaacaaaaggaacataaatcttgtctttacctcataacatgtataaaaattaattgaaaatgtattctaagcctaaatgcaagagcagacactattaaataccatgatgaaatggtagaagaaaaatcttgatgacctcaggttggcaaagatttcttaaatagtacacaaaaagctacaaaacataaaagaaaaaaatcaatatatttaatcacaatgaaaacatttgctcttcagtactctgctactaaaatgaaagggcaagccacagattggaataaaacatttgcaaaacatatgtccaacaaaggactttagaatataaggaattcttagctcagtaccaagtaccaagtattcagtaccaagaagacaaacaccaccataaaaatgggcaaaatatttgaacagacactaaaccatggaagacatatgggtagtgaagaagcacatgaagagatgctcaatgttatcagacaggagatatcactatacctccactagaatggatttttttttttttttttgagacagagtcttgctctgtcgcccaggctggagtgcagtggcgtgatctcagctcactgcaacctctgcctcctgggccaagcaattcccctgcctcaacctccaagtagctggatctacaggcacgcaccaccaagcctggctaattttttttttgtatttactagtagagatggggtttcaccatgttggccaggctggtcttgaacttctgaactcagatcatctgtccacctcagcctcccaaagtgctgggattacagtcttgagccactgtgcctgaccagagtggataaattttaaaagattgactataccatgtgttcgcaaaattgggaactggaatgctcatacatcaccagtggtcatgtaaaatggttcagccactctggaaaacagcttagcggtttcttacaaagttagatatttacctatcatgtgacccagccattccacttttaagtatttactcaaaagaaataaaagtttatgtctaaaaaaagatttgaacacaaatgttcacatcagctttacttgtaatagccccaaactgaaaacaactcacatgttgattaacagatgaatgggtgatacactgcaatacacgcatcctgtataatactcctctgcagtgaaaagaatgcactattgaaacatgcagtagcctggatgcatctccaaatcactatgctgaatgaaagaaaccagacccaaaaaaaccagaacataccatgtggttccatttgtataaaatttttggaaatggtgcctactcagtaatgacagagagcagattagtgggtgcttggggccaaggagtggggagcagcagggagagggattacaaagcagcatcaggaaacttgggggggtgatgactatgctcattatcttgattgtggtgatgatatattgataagcccgatttatcaaactgtacacttgaagtatgtacagtttattgtatgccagttgtcactcaataaagctgacattcattaatcagaacaaggtttcggaagtaagtagtggcgctggaccagactgcctttctggaatagtttgtttgtggcatcagtggaggatgagagaaggaatgtaagcagggataaagtatggagcaatttgattctcaagctaagttccaacagtgtcctttgttgagtaggggaattgaacacagggtgtcaagggcaaaaccaggtcattttagtaaattggggctggcaataatgtatgtgctgtattagaggtagagagtggggcagggatgccttcactcatccgctcattcattcaatacctgtggattcccctctatgggcctgatactcttatggggtatttttcttacatattagggacccaagaaacattcagatcttggcttcccttttaccccccacacagagagcagaatataaaagatggaatcagagaacaattctaatcagtccagtcaattcagtgtatgtttcttacgcccgcagaattaagtaggagaccacggcaaccatcccagccccagggaggagtttatgacatcagataggtgatggctggtgggttcagagtaattaagactgatggataactgcagagaggaaatctagttttcagggcaaacagatgcgtccaagagagagcccacacacgtggttggatgcagctggagatggagaattccagttcaaggaaaaggcctgggcagtatgtgtttggtggtggtcgttgaccctgaaaatagatggaatcttggagggagaaagcgagtgtggaaagtgaaggtcaggttgtgagctctggggcagcccacagtcagaggatgggtcaaagctagaagggcgagcaggccgcacgcacacacacgcaaagcagctgccttcactgacaatcaatggcagccacctgagctgtggctgagctgctgtgagccgaagcagtgggcttgctaaatgccgtcatccagcttccccttgaccctggctgtcaggcctgggtctgggagcttagggatcattttgtgcagtctgctcaccctctggctgtgccagggcacaggattttctacaaaagaaggaatctggggtgagtagagccccatgggagaactgagctgactaaatgtgagtggagaaatgccaattatgaaaaaaatgtacatatcaggggaacatgagcttgaaccttgcacagcttttcctccgcttggctgtttttatgaggacccaggcaagtggttctcaaagtgtggtccccccggaaaacaatatcagctttgcccggaacttactagaaatgcaggttcccaggcttaccctagacccactgaatcaggacctctggaactggggcccaggaatgtgggttttcccaagccctccaggggatgtcgatgtatgctgcagtttaaggactactgacttagatgttttaaataagatctctccctggcagcatccactcaaaagggggtttatattaagaacataatgtgacaacggtttggaaattgaaaagcactctacaggagtaggacattatttttgtttgtttattatttttgtcaacctcattcactcagatttcactgtattttagaacttgtttcagagattccccccttcctccttttcccttccccgaggaaaaccaaaatcttgttagtgaacaggagaattgattgaaaaaaaattcaactgctgcgggaaaggaggagactaggcacagctggagtttgcctgaaaggataattttctcagtgacattgggtttgttttgtttctttcagtgtagaagcacgaggctgatgactcatttaccattggaagacttcaaatccaaactgcagttgtcaaaataagattagtgctttcagacatgatgaaagagagggcatggtctcgaaaaggcaagcttgggttttgcctgcatttgtggagccctaactcatagcaagctttcctgtgggagtgggcagagaccccatcgtttacccagttgagtgaaatggcagccctaataacccacttctccttctctcttgctgtgataaacaatttctgatttctacatctcagattaaataacagcaagagctataaaaagtagagggtgtctcctaaaggtgttcatttgctttaactccaaagatgagattaaactgtcattggtgtcaacagcgtgcagtgcagcttgtctaaaattctgaaacgttggtgaaaccctttgatttagccctggatgatggccatagcctttgccccatgctccgtgctcccccctcagttctgcctccttccggtgtaagcagatgaaagtttccaagttctctggactgagatgcaggcaccagggtttctaaaggaaggcacttacatctagggtgcatgggagtctctggggaaactgtggttgggtttgagcacagctttggggctcttggcagcaaatcttcactaattagtttcacctgggaagactgagttatccctcttaaaattctccaggcactgaaacaagcgagcagattttgctgactgtcagatacatgctaatggtagctccctggcaaggtgtatctcaaatttggccaggtctttttgttatgaaattccaaattacctactttgctgtatcacttcaatttagcatagaactcaaaaaccaaacttggccagagataaattttagaacgttaggatctaatattcatgtttgtagggatttttttttttttttttttttttttgagacaggatctcgctctgtctcccaggctggagtgcagtggcgcaatcatagcttactgcgacctggaactccctggctgaaatgatcttcctacctcagcctccctagtagctgggactacaggtgtgtgccactgtgcctggctaattttttaattttctgtagagacaagatgtcgttctgttgcccaggctggtcttgatcctcctgcgttggcctcccaaagtgctgggattataggtgtgacccatcgtgccggcccatgtttgcagcttttataggtacccaataaagtgaaactattagaattgggatgtgagcaaaatttggttgaagttcaactctctgccatgcttaaataggtatgtgccactgacacttttcttttcccccttgatttaggaaaggagaaggatgctaacatttgttgaatacttactgtcagccctgcacttcgggaggccagggcgggtagatcgcttgagctcatgagttcaagaccagcctgtccaacatggtgaaaccctgtctctacaaataatacaaaagttagctggtattttgctgagcgtggtggctcacgcctgtaatcccagcactttgggaggccaaggcgggcagatcacctgaggtcaggagttcgagatcagcctgggcaacacggtgaaaccctgtctctacttaaaatacaaaattaggtgggcatggtggcacatgcctgtaatcccagctactcagcatgagtactgaggcatgagaatcgcttgaacctaggaggcggagaatgcggtgagccaagatagcgccattgcactccagcctgggcaacaagagtaaatctccatctcaccaaaaaaaaaaaaaaaaaaagttagctgggtatggtggtgcgtacctttagtcccagctactcgggaggctgaggtggaaggattgcttgagctcgggaagcagaggttgcagtgagcctagattgtgccattgcactctagcctgggtgacagagccagaccttgtctcaaaaaaattaaaaataaaaaaataaaataaaaatatcttctgtgagacagatgctttgcccatctagattatctcactcaaccctacaaataagatatttaacctttttatgaaaactgaatctctcaaaagtcccttacttgaagtcgttacccagctggggccaagtctggctccaaagtcgatattcttttcacctgcctgcctcacccctaccctttctgaggagacgtaactgacatcctgccctcccccagtggtggctctcttcatcatttttcatgtcacctctttcaggtccaaataaaaatttggagaaggtcaaaatcatcttttcagttcacactgttaaaaatggaagcctgctctctcaccacgctcaactcccctttcctgcttataacgtatcacagatttttacctatttgctttgtttactatcaatcttctatcaggtatgtgctgctaaatgtttaacaatcaggtctccaggagacaaaagctctgatttgtagatttgccaatttccatggtgtaaatactcccaccgtggacatttcaagctaccaacgtggcctctttgaatgcagctgtgggaagagatgcacatcattgtgtgagtcagtacgagctgcctctagcacatgactggcccctcactggaccatcagctctataagggtaggaatttttctgttgttgtccactgattcactgttgttttcccagcactccgaaccattccatcgttgaatagatttattaattcagtcatccacaaatcagccacatggcagatgctagatatttgaactagcatgctgagcaagacaagcactgtggctgccctatgtggcaggtgaaatagacatgaaataattagttgcaaattaagcattaaattataattgtgttgaggattacaaatggaaactctgagggaggacttcacccctagtggcaggtcagagcttcctgagaaagcagactttcaggtgagtactaaaggaggtatgagagttaggtaggggaaaaggaggtcaggaagaggcttgagcattctaggcagaaggaatgacctttgcaaaggtcccaagacatgaagaagcttgatttgaaaatggagagggccatgtaaatggagcagagaaaataagaggaggcttgagataagactggagaggtgaaggggtgggtcttgtagcccccttgaccatcacattagagtttttggactccatcctaaagcagtgataagccattaagggttttaagcagaagagaggcaggagcagattactctggctacaggaggatgctaggctgggatgaatacaggaaaaccagttaagaggttgccatggctgttcagccaacagatgatagtggctccatggtggcaggggagatgaagagaagtaaatccaggattgactgggtctgaggggtacaggagagggaggaatcccatgactttcaagtttctgttcccatcttcgaccccagggtaaaagttagctattctaaaaattcatctttgctaaagagaaattaaagaatacttcagaatcatccccagctgtcccatttctgcccagtgacatttattaattgagacagagctctaggctgcccagcaagggaggctgtcaagtcaacaatagatggctactaagcaccaactgtgtgaagtgcatggcattatacaggcaccgtaaggaacaccaagacttagagacatggctctgtccttcacagagcttacaagagtaggtaagagagatgagttaggaacacctgacaaccctgtgcttgtgtcacatgagcatgagttcattcatccattcaacaagtacttgttgagcaaggacaaagtgccaggcactgtgctagataccgggatgcagtggatagcagggcacacaggttccctaactgtcatgacagcttttctggtgtccatagctgggggctggctctgagatgtcattgtgttcttgatgcaggacaagtgagccccaaagtggggcttagcccatgagggttcttggctttatccaggagagaattcaagggcaagcagaggtagatgtaaacagctttattgaagagacggtgttacagccctggcagtgttacgcctccgtgactgctcctgcagagcagggctatccttataggcagagagtaggtagtagctcagggcagttttacagtcatatttatacccacttttttttttttgagatggagtttcccaggctggagtgcagtggcgcgatctcagctcactgcaacatctgcctcctaggttcaagtgattctcctgcctcagcctcccaagtaactgggattacaggcacctgccaccacatctggctaattttgtatttttaatagagatggggtttcaccatgttggccaggctgctcttgaactcttgacctcacatgatccacctgcctcggtctccgaaaatgctgggattatgggtgtgatcccagtggcctatacccacttttaactgcatgcagattaagaggcagtttatgcaggaatttctagggaagggatagtagctcttggtttgtcaggtcattgacacggagggggtggttactcccaggtgttgccatggcaatggtaaactgacatgtcacactggtgggtgtgtcttatggaaagctgcttctgccccagccctcaatttgatcctgtgtccaagccctgcctctggagttaagctctgcctctggagttgagtcctgcctcctacctcactctgagccctcttctggtgtgtgaatacctcttgctgaggatgaggagaggcagagagacttggagagaattttgttcccatctcagtcatcttctgaggaccccacatctaatggaggagggtattcttaggactttagggccattcctcctgggaggcagggcatctgggcctttttcattgttcattcagcaaatgaactcttatggagaccaaatacatgtgctaggacactgtgctagactctggagagtcaaaactgacccgcttataatggggcagatagccgtgatcaagtccttccaataccatgggatcagtgccgaaatgctagagcggagccatgtctatagtgctgtgggggcccaggggaagaagccttaactccagccaacttgaaggaggcttcccacaggaggtgacatttgactggggttgtgagccattcatgggggtcaccaggtggagaaggtggaaggctgtgccggggcagggggagctctggacacagtgcttcttatccttcagtgaaatcctcctggcctcagagagaaagaagggctgtttttcaaaagcataaggaatcatccaaaaaacatctgtatttgtttcaaaaggaaatggccactgccagaaaaacagcaaagttgttttgtcagaacccagtctgtatttattcctttgtctttgtttaattagattaatccctgaatggtttcccttgggtcggtacaaatcgctcgtggccataaatccccaacaattctaaaaacagtaagaaaggacaatccgcatgaagccaactggcaagcttgctgtttgtgggacagttctgggatgcgagcagtaatcttgcacccgcacataggtgtttggggttcttttagcctcttggagaggggagcaaggacaacaatcactcagatttgtttagaagaggaaagctgaaccgtagggtctcatcattaaagggggagactgactcctggatctgggcaccttccccagggaggattgtggggactttttatctgttaggttcaatgacattcagcctggctgcacactggggctacctgggagctttgacaaacaccactgcccaaatcccaccccctgccagtctgatttaattgtggtggggagtaccttggcatcaagattttcaaaggtccctgctgcttctgtagatgggagcttgcagttactcacagactcttctgcggatatcccagtctgtcctgaaaggaacaagcatatccttgcctttctctacctaccctgtgcagggaagccttttagaaaaaaagattgttccttcaaggtcctggttccttgcttttgaaatggtactttcaaaagggttcttttgtaacaggttgatttttttgtcttcctccattattataaaagttcctgttagaaaatttgaaatcagacaattataaataaaagaatgaaaaatcacctgtattcacaccactacttggtaaccatggtaggtagagttcctgccagacccctgatggggcaaggcagcatctgcagtagagattgggaggacccaggtggagaagctgctgccacccttccagagctggttccagcatgctggagcgtcacctcccagccatcaggacttcatgcagggacactgcccacccacttagggagcttagagtctagtaagagagacacagtacatccatcgctctataaatacatacgtagttaacattatgattcatgccaggagggaaaagtgcaggggtgggctgacagctgatgggtgaggccaaaagtgtaaagaatgtttaaaggtcctcatagcaagaggttaattttctcatcaccattcaggcaacccaaagctacttcagcccggaactcagaaacctactgctgttcccaagaaagcaatgcttttcattgaactttgctagaggtgcttaaattttcccaggcctgagaggatctgtggtgctgccagacttatccttccgaagcacaacttgggtgaaattgctggtctccctttttaaagtttttcccttgagtggtccccattgcccgctgattggagttcagcctatgcagcctgtgtgcagagatccctctgcctctggtgtcaatggtctttcccatcctctcttctgctacttcccctggaatttccagagcagaattcagctgccacgcctctcctgcttccctcttctgtttactcacgcgtcccaagcctggagtgctgtttctctttctccatacctgccagcctttcccagtccttgctagacttgcagtaatctgtcccaattctgaactcccatagttttcttggcacttctcttagggattcttatcatgtcctacctcgcatgttagttatttaggtggcatctaacaaccactctggcctttctgttcctcaaataggatcagtttgttcttcaggacctttgcattcactgttcttttggccgaaaatactcttcctaaaggttcatgttattaactcctagtaggatacaagctgcgtgacagcagaaaccccttgtctgttttgttcaccatgatatccccaatgcttgggacatagtatgcgctcaaaccgtatttattgactaaatgaatgaatatcgtatgattcagacatttcttatatctggcctagctcatttaggttttgtatttctttgattactcactacgatttttgtattagctgaagttttcttccggttatgggtgttttccttacatctgaatccactgaaaatctacattggactttctggttggagttctcaattggaaatgtgagatataaacttactggtgagaggtaaaagaatctgtgtctataaggcttttttttccatctactttattgatttgggagtgaaacttcttttaggagtttaaaaccagaattcttatttgtagactcttagacctaagcgtttttaaaatgtgatgatgtaagttttaatgtttaaaattgtttaatgcatttaatagagatgttgaatcaaatcagcttttatctttttaaaaatcaatttggatattttatatttatgtaaaagcataataaactatgaaactcaaagatctagaagatgatatgaaaatgtagccattggattcaggaattaatcaagctttctaggtaattaagtttttttaaatcatacctgttgtagtgatagcttttttttgtttgagacagtcttgttctgtcgcccaggctggagtgcaatggtgtgatctcggctcactgcaacctccatctcccgggttcaagccattctcctgcctcagcctcccatcttctgagtagctgggattacaggcgcgtgccaccacgccaagctaatttttgtatttttagtagagacggggtttcaccatgttggtcaggctgatctcgaacttctgacctcagatgatcctcccgccttggcctcccaaagtgttgggattacaggtgtgagctaccacgcccggccagtgatagcttttaaccagagaaaattctctttaatatattcaacccctttaatgctctctgattatctccagttttaatggcaaaatcaatggtacagctagctgtttcatggtatccaagctgttctccttgctgggaaatagtgttagagactgagtcagtgatggatggaagatgcctttaatcttttcatccaccaacatattcttagttctgttgcagtagatgcatactgcaagtccattcctacgttgcatgtgaataaacaggcagagcttagcacttagtggacatgtaataaatatttgaccaaaataagaccacgaatagacatgtatctatttctccctggcaatgtttgttacctctacctaacctcttttggcttctccattttcctcgtttgttattagaatgaatacatagagcacaaagagggttttcaaagagctttgtctcattccttcttataccagcaacagagtgagattctgtctcaaaaaaattatttaatgtatttcaaagtaattccaactttgaaaaatgtggtttttttatgttatttatttattttgagacagagactcgctctgtcgtccaggctggagtgcaatggcacgatcttggctcactgcaacctccgcctcctgagttcaagcgattctcctgcctcggcctcctgagtagctgggattacaagcacacaccaccacactcagctaatttttatatttttagtagagatgaggtttcaccatgttggccaggctggtctccaactcctgacctcaagtgatcggcccacctcggcctcccatagtgctggaattacaggcgtgagccaccgcatggctgaaaaatgtgtttttatatacatgcagaaactcacctggaaagaaaactcaccaaaatgttaacagtggttgcctctgggtagtaggattacagatggggggattacaggtgaattttcttttatctatttttttatgttttccaaattttctactatgatcacgtatcaaaccttacaatgtttttaaaagttactttggtgagggctctggagttccctgttgcctcaccctgggctgggagcattctcaggtgtgcctgacgttgtgttctaacatcgtgactttgcctcagtccaggatctgtgtgccatggaggaccacaactgtgagcagctctgtgtgaatgtgccgggctccttcgtctgccagtgctacagtggctacgccctggctgaggatgggaagaggtgtgtgggtgagtatccctccagctgggcttggtagggaaggacaagttaagcatggtgaggaggaggggagactcacgtgtacctcccacatatttgtttcctcacctttgggtttccacaaagtgctcagttgtttggtgtagttgttaggcagaatttgaactttaaaggcttcatttatggctgaggtcagcgttttcttattctgggtctccagtaaaaggaacacttatgataatccatgcaaatataactgtgtgttactgcatctcttgaaaaggatcgggtggattttcttcaactttggaggatatgtttggaatggcctgacttatatatagctcaggtgttatacatgaaatttacttgggtgggttgctgagtgacacctcaaagacaacgggcagccttcctccctaatgtcacctatagctcagtgacaggccaaagtgactgccaggtgaaagagcccagccatatgggctcagcgtaattagacggcgtggtcagaggaaactagcagtagcctcaaaccctcaaacacaagcccaggtaatgaggctcaagggcagtgcttgatgctgcagacatcccccctgtttatctacaaagcctttgcaacttaacatggtctcattcctccttataccaacaaacagtgcctggtggatagtaggtgtttcataaactgaactgaatacttatgaggcagaaaatctagaaggaaaagaacttgactgacatcaaaactggaatgtaaattttctgctaaatcctgcattttgtcttccgtgttctattgttttcaggaccctattttattttgcttcgcacaaacagggtatgcttatatttttgcacatagaatttgcattttccagcacaccttaattcttagctagggatgtggaaggcaaaacaaaacaacaacaaaacaaaagttaggtggtagcctgcaattggcaggtgagtgatgagagtatcgtgggtttgtttttacacactgataggaatgaaagcaacctctgcctctgactctcatcaaagggccacaaatgcagctggtctcctgggccttagggttgtttttcttcttaatctgctggtggtggccatgatagagtggcagggttccacacccactaccactagcaaaaaagaagccaacatatatacccatggttatttttgcttcattaatttttattatgcaagtaatacccgttcatagagaaacttaaacagatgagaaaaatcactattaataggttattgtattttctaccagactttctccatataaatatctactttaaaacattttgttggacaggtgcgatggctcacgtctgtaatcccagcactatgggaggccgaggcgggcagatcacttgaggtcaggagtttgagaccaacctggccaatatggcgaaacccggtctctactaaaaatacaaaaattagctgggtctggtagtgtgcccctgtattttcagctagttgggagggtgaggaagaagaatcacttgaccctgggaggcggattttgcagtgagctgagattgtgccactgcactccagcctgggtgacagagcgagactcatctcaaacaaacaaacaaataaacaaaaaacattttgtaaagatttaacaaaatgaggtcacactgtctattttgttttacaacctgctttttcccctctactatttgttaaatgggtagaaactctgagtgctgtttggtcaggaggaaatcaagccattgtgagttaggctggtggaggagcttcaggaaacaggatgagggtaatgggttgattaggacaaggggagggacagtagaacacagggcttgcattggtcacagggagtagatggggcaggaagcccaccttggcccatgggaaactggaggcccctgaaaaacccatttctctgagtgtttccaaataattacctgcttgtccgtgtgtagtagagaacctttgtatctctgaggattttgctgtaacttttgggatttgacatttattgaagagctacaagcgtgggagggtagatgctgtcattgccagagagctttggcgtgctgtttatcggagatgggcgtttctctgcggctgcttgactgcatataagaatgtctgcattttctcagtggggatccaatccaaagagtgggaaaatgggagagactgcatcccattgcaacccaggtctcctccgtcagatgatcctagcatcaccagccttaccaccttttccccaatgccctttacagcggttcactaagcactcgatctgttagaggctgggagtgagatgattaagcaggcagtacttttgttgccagtagcctttcttagggactccagacaaaatcctacaaggttagttgctgctcaatagggctatggtgagtacaacgcaaatgatagagaaaatattggccacggaaggtcagagagagacatcctaatggctaggctggaagatctgagtgtggaaggaagggtggcaattggacaaatgtccaaggcagggggagagatgaagggcagtgactgtggaggtggcaatgctcttcaagcattagggctaagtctggcctaggagtggcagggccagctcctgggagctggtaggtcagagagagactgttacagtgaaaaggccaaactgaaagttaaccaggtggcctaacctgagggccagaaggcgcttatcaaagatggagactccaggtaccagacttagagcaggaaatttagaggagaggctggtgagaactctggacatactccattagtagctgatctggggtgccctgtgtgtagatggccagggaacattaagaacagagtgattatgcctcccagttaatacaggacaatcccagtttatgccctgttggcccaattcttttttttttttttcttttttttgagattgagtcttgctctgttgcccaggccatgatcacagctttgcagcctcgacctcctgggctcaagcgatactcccacctcagcctcctgagtagctgggaccacgtgtgtgcaccactgtgcccagctaatttattttttgtagagacagggtctccatacattgtctaggctggtctcaatctcctgggctcaagtgatcctcctgccttggcctcccaaagtgttgggattacaggtgtgagccacctcgcctgatgccatttctttttatttttagacagggtctcactctgtcacccagactggagtacagtggcgcgacctcggctcactgcaacctctgtcccccaggctcacatgatcctcccacctcagactcccaagttgctgggaccacaggtgcataccacacgtctggctaattttttgtatttttggtagagatggggtcttgctatgttgcccaggcaggtattgaactcctgagctcaagtagtctacctgcctcggcctcctaaagtgcagggattatagacatgagccactgcgcccgactgaccccatttcttacccagctggcctcatttcttgatggcacatcttttcactttgaaaggggttccagtttggatgataaattacataatcaccctagttaaggctgtccaatttgacttaaactgttaagttcagcagagaattcctgtatacatgaagtaggagatgaagttgaagacagcagaaggaactggattgttcagggctttgaaaatcagacgtaaagcctagattttatctctgaaaaagagccaccgaagggtttatatttgggtgacaaatgcaaagcttcatttttaggaaactcaacctcatggggaactgcagggtgtattccaggagaaggatggcaagaagtgggaagaccagataggagattgtagcagttatcgggtgagagaggataggaaccagccaggatttgaggtgcaactgtaggaaaggagagggagacagtaaggaatgaaagaaggtgctgtacataaagggaacaaggagaagtcaaaagtgactctaggccaggtaccgtggcacatgtctataatcctagtactttgggaggccaaagtaggaggattgcttgagcccaggtgttcaagactaacctgggcaacatagtgagacccccatctctaccaaaaaataaaaaaattagttggacatggctggatgtggtggctcatgcctgtaatcccagcactttgggaggctgaggcaggcagatcacctgaggtcaggagtttgtgaccagcctggccaacatgatgaaactccatctctactaaaaaaaaatacaaaattagtcaggcgtggtggcagtcacctgtagtcccagctactccagaggctgaggcaggagaatcgcttgaacctgggaggcagaggttgcagtgagccgagatcgcaccattgcactccagcctgggcaacaagagcaaaactctgtctcaaaaacaaaacaaaaatattagccaagcatgttggtgcacatgctggtggtcacagctacttgggaggctgaggtaggaggattgcttgagcccaggagatcattcaaggctgcagaaagtcatgttcacaccactgtactccagcctgggcgacacagcaagaccttgtctcaaaaaaaaaataaatgaataaaattgaaaaagactccatgatcttgagcttccatggctgtgagagtgatggcaacagtgatggaagagtgatggaatcgattttcaaaaagataaggccaagcgtggtggctcatgcctgtaaacctaggactttgtgaggccaaggtgggaggattgcttgagaccaggagttctagacaggcctgggcaacaaagcaagaccctatatctacaaaaaaattaagaaattagctgggtatggtggtgcacacctgaagtcccagctactccagaggctgaggtgggaggggtgggaggattgcttgagcccaggatgttgagactatagtgagccatgatagtgccgctgcactctagcctgggcaacagagtaagaccttgtctcaaaaaaaaaaaaaatgttggggtgataattagtagtcattgacaaggtgaattttgaattcaggttagacaccacaaggacacgtcaagaggaagcagaaaactcggcattaacatgacagagagagtagaatcaatgctgtagtcaggaagcagcatagtttatttcttaacttccagttattttctattttaaatatttatgtgtcagttggtttgttttgagggcatctagacctttaaaacagtgctacctgagctgaaatcccaactctgctacttgctaggtgtgttaggccatttgcgttgctataaaggaatacctgagattagctaaaagaaaaggtttaattggctcatgattctgcaggctgtataggaagcatgacaccagcatctgcttctggtgagggcctcaggaaacttccaatcatggtagaaggtgaaggcggagcaggcatgtcacatggtgagagcaggagcaagaggtagggggaggtgacacactcttttaagaccaaccaaatctcacatgaactaactgagcgagaaatcacttatcaccaagatgataacactaagccattaatgagagatccacagctatgatccaatacctcccactaagccccacctccaacattgggaatcacgtttcaacatcagatttggaggcaataagcatccaaaccatattattccactcctggccccccatatttcatgtccttctcacatttcaaaatacaatcgtgcctttgcaatagttccccaaagtcttaacttgttccaggcttaactcaaaagtctcaaactccaaagtctgaagtgtcatctggagatgagttccttccacctatgagcctgtgagatttaaaaaaaaaaaaagaaaaagtttttacttccaaggtacaaggtgttataggcactgggtaaatattctcatttcaaaagggagaaattggccaaaacaaagggcaataggaccatacaactttgaaacccagcagggcagctattacattttaaaactccaaaacaatctcctttgactccatgtcctgcatccaaggcacacaggtgcaaggggtgggcccccaaggccttggttggctccgcccctgtggttgcagggtatagcccccaaggctgccctcacaggttgttgggtgcccatggctcttgcatgctaaggttgcaaactgccagtggctctaccattctcaggtctggagggtggtggcccccttctcacagctccactaggcagtgccccagtagggactctgtatgagagttccaaccctacatttccctttggcactgacctagtagagtctctctatgaggcttcacccctgcagcaggcttctgcctggacatccaggctttccaagacatactctgaagtctagggagaagctgccaagcctctttcatgcctgcattctgtgtgcctgcagacttaacaccacatcgtagccactaaggtttatggtggcttgtactctctggagcagcagcccaagctgtacctgtggccctgtgagccatggctggagctggagcagcctggatgtgaggagcagtgtgctgaggctacacagggcagtagtgccctggacctggccccccaaatcatttttttcccctaggcctctgggcctttgatggggagtgggtgctgcctagaagatctctgaaatgcctttgaggcctttttcccatgtcttggatatttgcacttggctcccttttagttacactaatctctctagcaagtggttgctccacagcctgcttgtattcctgtcctgaaaatgccttttctttctctgccacatggctaggctgcaaattttccaaacttgtacattctgcttcccttttacatataagttccaactttatttctttgctccagtatctgatcataggcttgaatgctttgctgtttagaaattttttccatcagatagctaccttaggtcatccctcttaaattcaaacttccacagatccctagggcatgaacacaacccagctaagatctttgctaaggcatagaattggtgacctttactccagttcccaataaattcttcatttctatctgagatctcatcagcctggcctttactgtccatatctattagcattttggtcacaaccacttaacaagtctctaaggagttccaaactttccctcatcttcctgtcttcttctaagccctccaaactcatctgacctctgcccattgcccagttccaaagctgcttccatactttcaagtgtgttaatagcaacaccccactctcagtaccggttttctgtgttaggctgcttgcattgctctaaaggagtacctgagactgggtaatttatttgaaaaagaaagagtttaattggctcacagttctgcaggctgtacaagaagcatggcattggcctctgcttctggtgagggcctcagaaagtttacaatcaaggcaaaagccaaagggggagcaagtatgtcacatgacaaggacaagagtgagagttgggaggtggggagatgccacacttttaaacaaccaggtctcatgtgaactaactgagcaagaactcactcatcacctaggggtggtgctaagccatttatgggggatctgtccctgtgatccaatacttcccaccagggtccacctgtaacacgggggatcacatttcagtgtgagatttggagggcacaaacatccagaccgtatcactaagcacatatctttaagtctaatttctgagcttattttcctcacccataatgtagaatagtaatatatacattgtaaggttttatgggattaaataagatagtgagtgacattcccaatatactctaagaacttagcattattattacaacacctactattatcgtaatttcctgtatatagtgaagtatggagtgagaagagagtgaaggactgagccttggattgcagtcacatgtagggagcaggaagtaggggcaggaaaaatattcatgaagaagtagcttaaggctgggggagagagagaagaatcatggaacatgataggaagataatttcttggccaggtcaatattaatgtcatgcttcagcatggccaaaggtaacaggacttagagaaaaagccatcaacttgagtcacagattcaccgctgcaaacatttcagaactctgccagggactttgctaggcttgaggagcacaaaggtgaccaggaggccattgagaatggcaaagggggcatgggtaaagggcagatttcaagaggcagggagtgggtgacaagaaagtgtgggcagcaggttcaaactatttatttaaagaaatttggtagaagttaagcatgtccagctgatgcagggcaggcaagtcccaaagtggagcttagcctacctgggttcttggctttgcccagggaagaattcaagggcaagccagaggtagaagaaaacagctttattgaagaggcagtgttatagctccatgactgctcttgcagagcagggctaccctgtaggcagagaatagcagcttaggcagttttgcagtcatatttatacccactttcaattgcaggcacgttaaggggaggtttatgcagaaatttctagggaaggggtagtaatcgttgggtcattgcccaatgatagtaagggatggtaactcccaggtgttgccatagcaacagtaaattgacatggtatactgattgaagtctgattgaaggctgctttcaccccagccctgttttagctagttctcaatcaggtccgatgtctcagccccacctctggagtcaagtcctgcctcctacctcacagctactagtgaatttatgcagtagattttcagtttcaacactttcatagctactgctatgaaaagcacttcttttgttaccaaaacattaggggttcagtctaggtcctgttgcttgttgcacagaaagccaatcactgagacaacaagtattaccaggaaagaaggcttcagtcaggtgccatagccaagaagatgggagatcagtctcaaatccatctccctgactgactaaaattagggatttaggctggatgtggtggcttatgcatgtaatcccagcactttgagaggccaaggtgggaggatcacttgagaccaggagtttgagaccagcctagacaacatagtaagactcctgtctctacaaagaataaaaaaaaatcagctgggtgtggtggccaacacctgtagtcccagctactcaggagggaagattgcttgagtctgggaggttgaggctgcagtgagccatgattgcactactgcattccagcctgggtgacagagtgagaccctgcctcagaataaaataaaataaataaaataaaaattaggggtttatatagcagggaataaatgtaaacatatgggggaaaacaggaattagggaggagtatggaagaggagttggtcaacacgcagcaggtggttggttaggcagtcataaatggggaggggtctggcatgtcattgtgcagatgcagtgatctggtaagtttcagccccttgatactgtcagagagtcctgacggtttggttcttgagaagggttctcagataaaacaaatgtaactttctcaagtttcaagactggaaaggtaaatttctatgtttattcaaaataaaccataaacatcagttctgtgggacaattgggccggtttcactttgattcatccctgaattattactgtgacctgcatgaaagttcagttcttagtcatggactcagcatttttttatagatttccacacatttgagtaagtggaacgttcaattccagcaccagagttccaactccctgacagctcatttcaccattgagagtcctgaatttattccgtattcaatggtggattgctgactaagaacctcctctgctttagtggagtccctgaatttataattcatcagctgccactaaagtcatgttcattgccatccaaaactatttttcaaagaccatttatctagatttctgaacatgaattttctgctgtacttactcacctggtgtttacaaactgtcttttattttggggtaactttggtcctgtttgcatcttatctacccaggcagattgtaaacccttgagggcaaaaccacttgtacttttcatctttcacagagtggacttgaaatacattttcttgaagcactgactgaggttgattgcaatctcatgcattcatgttttgtaaaaaatatttcccccattgactggtttttaaattataaagtcatttttgcttattaaaaaaaaaaagtcaggccaggcatggtggctcaagcctgtaatcccagcacttcgggaggccaaggcgggcggatctcttgagctcaggagttcgagaccagcctggtcaacatggtgaaaacctgtcactacaaaaataacaaaaattagctgggggtggtagcacacacctgtagtcccagctattcaggaggctgaggtgggagaattgattgagcccaaggagatatgtgccaccacccccagctaatggaccaacaccgtctctaccaaaaatatataaagaaattagccaggcatggtggcacgtgcatgtagtcccagctacttgggaggctgaggtgggaggatggcttgagtctgggagggctgaggttgcagtgagccgtgatcatgccactgcattagagcctgggcgacagaatgagaccctgtctcaaaaaaaaaaaaaaagaaaagaaaagaaaagaaattttctctgggttttaaatcctgcatttggaattccagttatgccttggagaagagaggttttgtgagtctgactctgtgtgtgtgtgtctaatgtatgctcagcaagtaaattggttctaccatttctctaaatgacaaatttggtttttcttactttgttatcagcaaactttaaactccaaatgctcctctttaaaatatactatttctgctaatgccattcccttgcagacggagtcctgctgagaaaacgttagaattggaccaggttataaaacagaaatcattgattttagggttttattacctgcagcaaggtatcatttattcttagagacagtggagtgatttctcacatgttgggcagagaatgaatgtggcaagactgacttctgactctgggatcttagcacttgtgatctggagggctaaagagctacagctggagaattactctttccatttgtaaacaagaatgtagacattttaggcataaatgactgagaacagattttgttgaagtagatgagaacttggaacaatagagccatcattgagttatacaagaggtcacctccatacatctgcctccctaatcttgacctctctttttatgagtacaattttgcaaccaagaaagttatgcaaacaacccaaaccacttggcaaataacattagagctgaatgccctagaactctcttggccttaaaaaactgttagattcacatgcctggcagtgggttcttccatgtttaaccactgcactgatggcctcatctgccgtctccagaagcctagcagtgtgtcagtgggtggatttcaaattgagatgggatttgacaccttggagttttacagactggagacttgggacccaggaatgcgtgaatcctgccttgccaatcacatcctcccccttagttccccagagagctgtgtacacaaagaacaaaaacattatgagagtcaagatccagagaagctctcttatctcatgaattgggcctgtggttagctgataaatggaaaacatcattcagagaggggaatcctaaaaaactatatatgcaaacccaccttagtcattttatttttatttaaaacacataaatgtatacttagtaaaaatcacttttatgcttttaaaaaatgctaattttaagttgaagaaaaaagtatgatatttacaaatctttttttttttttttttgagatggtataattctgttgcccagattggagtgcagtggcatgatcttggttccccgcagcctcaatctcccaaactcaagcaatcctcccacctcagcctcctgagtagcttggaccacaggtgcatgccaccatgcccagctaatttttgtattttttgtagagatggggtctcgctatgtatcccaggctggtctcgaacccctgggctcaagcagtctgcctgcctcggcctcccaaagtgctgggattatataaaaatcttttttgcataaaccatacccataatgtgttgtctatgattttttagttttggtttctttaaattggaacaaggatttcaagacatctgtaaagcagtctaacagcagaactcttgtaaattttaatgggaaatttcccaatgttttacatttgtttcatccatgcctggttctatagcaattttggttagcaaattgctttaattttttccaaagctttcaacaaaatttttatttttaaaaactcagtttcttttagtgcttatattttattggtttttattttatttatttatttattttgagacagaatttcgcttgttgcccaggctggagtgcagtggcacaatctcagctcactgcaacctccacctcctgggctcaagcaatcctcccacctcagcctccagagtaaatgcgacaacaggtgcccaccatcatacctggctaatttttgtatttttagtagagatggggtttcaccatgttggccaggctggtcttgagctcttagactcaagtgatccacccaccttggcctcccaaagcgctgggattacagatgtgagcctttttgttttgttttgtttttttgttttgttttgtttttgagatgtagtctcacactgtcgcccaggctggaatgcagtggcacgatcttggctcactgcaacctccacctcccagattcaaatgattctgctgcttcagtctcctgagtaactgggattacaggcgcctgccaccacgcccagctactttttatatttttagtacagatggggtttcaccatgttggccaggctggtcttgaactcctgaccttgtgatccacctgccttggcctcccaaagtgctgggattacaggcttgagccaccgcgtccagccccagcccagtttttataatatttaaattacttacaataacatgtacaaatgacacatacaggtttggaaacaaaagcaaccttgactctaacaatggctcttaagttttagcgtgcctcagaatcacctggagggcttgctcaaacacatattcctgggtcccactcccagaacttctgatcagtaggtctgggatggagcctgagaatgggcattactgacaagttctcaagcgatggttgatgcagttggttcacagaccacactttgagaaccaatgtttataagaatacatctcagtcaatggaaaaagtacacaggtgtcctagagcccatgtgttccaccaaggctgctttatcagcatacaacccagccaatgtgaggcgtgtacaggtgttttaaaacacaggtgttctaactgccttgagtgtgtagcatgccctgggttatcaggattcatatggtcagagggaatgaaagcgttgcttgatcaggagttgcttaaggagtgatcagttaaaagagcatcttagtacaacttttttcttgaaacacccgagccaatttggatactctattctataacattctggaaaaggggaaagtttggagtatgtggcttagattcaaagcctaagccaagccttcaacacctctctaaattattacattagtctaaattacggggccagcataattatgggatatccctctgagagacagaaatggccgggctcagattataccccatggtgtaagagaggacattcaagagaaaaggtagagtgtgagtttctgacttttaggtatagagacctgaccactcattgttgcagcaccatcaatgtcctacaatttggaagtcagatcagcagctcctctctttgtaggggatactaagaagtgggtggccatagataggactggctgactgatggcaggcacccatatccaggattgggagattttcatcatggtgaatcaagcccagcatgaggaagttgaagctggggattgttgactgctaacacgggcccaagcaggctctggcatggccaactcctgtgacaaacagactggaccgtgtgccagggtttagccttcctcgatctcagtgttcccagtgtcaccattgattcttttgatgatcccttggttcttgagaaatgagaaatgaactattagaaggatgtggtgctagctcagtctttatgttatgactcaactctagcaaccagctgatatccaatgacgttgagatcctgagatgacatgaatgccctatccccaacataatggcttgtgaattaaacctgcaaatactaggttctactagaactctttagggagctgaagttacaaaaacaatatttagactgaaacttttttttttttttgagacagagtcttgctctgttgcctgggctggaatgtagtggtgcaatctcggctcccgggttcaagcagttctccctgcctcagccttccgagtagctgggattacaggcacctgccaccatgcccagctattttttgtatttttagtagagacagggtttcgccatattggcaaggctggtctcaaactcctgacctccggtgatccaccctcctcagcctcccaaagtgctgggattacaggcgtgagccaccatgcctggcctagactgaaacttaatgaaactttgaagcaaaagaataaacgtaacacaggttattaccctttacaaatcttcagtgtccctttgcatctttttattgctatgctaaatatgtcattatcttctccatgcatggttttgctttttaaaattttacatatgtattacttttgtagattctatttccttgttattatttacacacttttgatattaatataatcctaaaacattgtagggagtacttttttttgaaaagggactggtcttaagctcctgagctcaaatgattgccctgcctcagtctcccaagtagctgggatttccaaaaacttttttttttttgagacagggtcttgctctgtcaaccccagagttgaccctaggtgcactctctttttctcatttcacctctaatccaacaggaatcctgttagccccaccttcagtatttaccaggtgtattagtttgctagagctatgctgtggtttggatatggtttgtttggcttcaccaagtctcgtgttgaaatttgacctctgtggccaggcacggtggctcatgcctgtaatcccagcactttgggaggaggctgaggccagtggatctcttgagctcagaaggttgaggccagcctggcccacatggtgaaaccccgttcctactaaaaatataaaaattagccagatgtggtggcgcacacctgtagtcccagctacttggatggctgaggcaggaggatcacttgaacccaggaggttgaggctgcagtgagcagaggtggtgccactgcactccagcctgggagacaaagtgagaccctgtctcaaaaaaaaaaaaaaaaaaaaaaaaaaaaaaggacaagaaatttgattcccaatgttggaggtgggacctgctggaaagtgtttgggtcgtagggacagatctcttcttataagaacaccagtcatattgaattagagcacgccaccctaataagcacattttaacttggttacttctgcaaagaccctatttccaaataaggccacattcgtaggtaccagggtttaggactccaacatgtctttttaggggacataattcaacccataacttccagaacaccactccccctcatcccctgcaacatcctggtttaagcctccacccttcctccctgggattactggagtcactttcttactggttttctactctcagatttgccctgtcagtctattcttgactcatgggtccagaaccctgcagtgactcccaactcattcagactaaaagctgaggtccttgcatggcccatgggtccctcctgactgcccccttctcatctcccacctctctccctcctccagccaccctggcctctttgctgatcctccagcccaccaggcagagtcccacctcctggccttcgcacttgctgtttgttttgcccaagataccctctcccagatatcctcacggctcgtattttagtcaacactcttcctaaccacccaccttctcagagaggcctctcctgaccacctctattacatcccacctgctacccactcccccactgaccctactcctattcattgttttgcttttctccagaattttctttatctcctaatagactatgctatttacttattttacttcttatctgctccccactcccagcatcattatccaaatatacgctccttgggggctggaattttggattattttcttacttgttctatccctagcacctaaaacaggacctggcccatagtaggtactcaggaactaatgaatacatttttgttcattacacatatttgtgtaatgaacacatatttgtggaactaatgaaacaaatgaaatatttgtggaacacaggaacacatttgtggaactaatgaaaaatcagccagtgtattttctcatacattgttaaatcatttacccttattcaatgttcatcttattttctaggattttttgttgttgttgtaaacaatgctattaatagtttattgtatataatttcacccttttcctggctatttctttgggtttcacgtccagggtgaacattgtcaaattgccttccaaaaggatctttctcaatttataatgcccctaccattaataacgctgctgcctttctaccactgggttttatctcatcttatttttgccagtttactaggtgtaagtgcaccttgtgatgattttgatttgcaattctttaacttttaaatacaattgttcacatgttctttagtttacttcctatatcttcctatatgaattgcctgatatagactcctgattttttttgaggggggcagagaccttgggttcataactgtttatcctactcttttggggggcaataatattaatcctaattaatatctgttatcattttgccctcatcctaccattcccttttcctctgtttgcatttctaattctgaatgtgttttattctctccagctgtggactactgtgcctcagaaaaccacggatgtgaacatgagtgtgtaaatgctgatggctcctacctttgccagtgccatgaaggatttgctcttaacccagataagaaaacgtgcacaagtaagttacacacacatgcacacacagagaaatatttgctgttactgctgtggtgactgtgaccatggaactctctcaagtatagattagcaatataattatgtcatgggggtctaataccttttgccccattcctcctctgtcaggactttcatgacttggcttaagaccatagaccactgtatctcaacatcactattcaaggaatatgatgaaggcaccatgtgtaggactgttccttcagcatctgctgagcatgctgacaatccgagcaacttacttcctgctaactcagcctgactgtgcccatcagtactaacagggcttgagatgttttcattgaagctttgtggcttgtgggctttagctctgactccacgcgagaaaatcgctgagccaaaaagaatcataagtgatttcttctggtggaccgcagtttgcaaagaactgctcatgttttgtttgagctatttagttcaattggattttaactgtatacataaaaatcagaattaatttcagctcccaaaatttgaacataaaattcgataaactaaagatgatcattagttttgcaaaaaagataataactagttacaaaaagattccaaaagtgttctattaaatataaaggtacatcaggagacttaagggattgtgtatggattattatccttctatagggaggatcacttgagaaaagcttgcttgttaagtattagggccaagcatttataaaaagtggactttaataacaatctagaatagggtaaggcacctcagagacatgcatcagtgagaaaacaggattttaattcataaaaagttcatgtacctacaacctttctaaaatgtattcactatgtaaaacaggatacatctgcacaaaacctttttcaacataaacttacttcctactcttcaatacctaaatatcagcagcttacaaacaccagagctggaggtttgggtgatgtatggaactataagggacacattaggtcaaaagcatacatttctggagccccaaccatgtgccaatagaaatgagtacggcaaggtccttaagggagaagataactgtggctgagtcttggaggtggagctgtcattcactaggcagaaaagggtgaggtgggggttccaggagaaggaaagaagttgaagatgtgaaccaagcagagaactgtagtctccatgccccgtgcatgactggcatatacagtggtttatttgttttgtttattgaaagagtaagtaaatgaatgagtgggctgctgtgtttgtggtctcccttcccttctgaatattctgaactgtaaaatagcagcctgtgctgtcgtcgtggttggggagttgtggttgttgggctgatgagtcagtgttcctcatcaaagaggaggccgtgggctgccagcagcgggccttggttctaatcccagcttctctgctttttctcttggtgatcttgggcaagttacttatgcctcagtttcctcagttacagtacaggatgataatgctgcctactgcatagcattattctttccttttttttttttttttttttttttgacactgggtcttactctgtcacccaggctggagagcagtgatgtgatctcggctcactgcaacctccacctcctgggttcaagcgattcccccacctcagcctcccaagtggctgagactacaggctcgcaccaacacacccagctaatttttttggtattttttgatagcagtggtgtttcaccatattagccaggctggtgtcgaatccctgacctcaagtgatccacccacctcagcctcccaaagtgctgggaatacaggcatgagccacagcacccggccatagcataatcttgaatactaaatgaggctgggcacagtggctcacgcctgtaatcccagcactttgggaagagaagcaggaggattacttgagcccaggagtttgagaccagccctggtaatatggagggaccctatttctacaaaaactgttttttttttaattagccaggtatggtgacaagtgtctgtactcccagctacttgggaggctcaggtgggaagatcactagttgggcctgggaggttggggctgtagtgagccatgatggcaccactgcactccagcctggaggacacagtaagaccttgtcttaaaaaaaaaaaaaggctaaaaagggatgatgtgggtttcaaagactttatttattatcattatgtttttttagaaataggatcttactctgtcacccatgctggaatgcagtggtgcaatcctagctcattgcagcttccaactcctgggctcaagcaatcctcccacctcagcctcccaaagtgctggaattatggtcatcatgagccaccacacctggcctccaaaactctaaaaaaatgagtatttaactgtgcatataccacgtgcctgggctacatttaaaggtgcaaaaaacattcaagatttccactgcaagctggtgagggaccttagccatagccacactgagtagctgagtcatggtgccaggagttatgtgaccaagggcctacagtgtgatgcagccaggaccacagcaggagttagaggaaggagaccagttagaccagaacaggtgagatgctgccttgcagggatgaggactggagaaaaacacatatcctagccagtctcctacctgcctctccagactgcacacactggctggggtcacctgatttccaccccagcaccagccctagttcccagagtggcaccatcttccccaccctgtggctcagcatgcctcctgtcccagatccccagcccagggtggtgcaggcaaggagggtgttggagccctggaatcagaccctggaagtagataccgcagcatagtgggactgggagaggaggtttagctaggagccacgggaggggctgatccagctgtgaggtctcaccagctaggcagcgagcccagcagtgcagttgtcagaatcaagatccagaagtgggccgccccaatgcgtgtgcagggaagagtgctgggagactggagggttcgtgcaggcagcctcagggcagtacatcccttagaagagccctcttcccaccatgcttggggtgggcaggagccagacccaggaggagggagacaagaggaagaaaggagacagagtacttggaaagctaagagtagaaaataaggcaaaagcccagtcgtaagaatgaaacactcaggagtgctccagatctgtggcagggacaagaactgagaaatagagactagttaaaattacagaaacaggatagaggcagaagctcagaaccgaagcagccaccctgttttagtgagtaccaaggcctcccaccagcttccagccaagtcggcctggttactgctgtgatgttgaaagatttttttttaaaattctacttcttatacacttgcaaaaaatgaaagaaactcagtttctcaaatttcagcctatatttttaaccaaaagtatatttgaaagcgaatacaattagtaagtgtgcaactattatctcaaaaaggtagactagtcaatgtaataaaccaagcatggttaatttatgattaagcaaaaatgtacataatagggctttatgttcatgaaccagtactataatttgaaatatgtaagtggtgttcaaaaaagcaccacctttatatcaatttcttaccctagagcagcccatccaaatctagacgggagaaaggtggaaacacacaggtaccatcagtttgcaaaaagttagcaagacttttctttttctggtattgttataaaacatacataatagaaaatttaccactgtactcattcagtggcattaaatacactcacattgtgaaaaacgcatatcctagcctgtctccttcctgcctctccagaccacaccccctggctggggtcacctgatttccacccagctgtaactatcctcaccatccatctccagaacttttcatcaccccaaactgaaacgctgtacccattgaacaataactccccattgcctgccctgtcaaccaccattctactttctgtctgtgaatttcaccactctcggcacttcatgtaagtgggattatatggtatttgtcctttgccgtctaacatatttcacttagcataatgtcctcaaggtttatctgtgttgtagtatatatcagaatttccttcctttttaagactgcataatattcaattatatgtatatatcccattttgtttatccatctgttgatggacgtttgggctccttccaccttttgcctattgtgaataaagctactataaagatgagtgttcaagtccttgctttcagttcttctgggtttttatacccagaagtggaattgctggtcctatggtagcaagactttttgagatctagattgaaacccttattcttgagccaagcatgagaaagaacactctcagatatccagggtcttttcaccagaaagatctatagaggacttcagtctgctggacagggattcatgtctttggtagcaaggagactgtgggctttgagtctaatgcttaatcatctaatgcctgtaaggatgaataaaggcaattgtggacaccatcttttgcatgttgccatttattattttcgtgcttggaggtcattatactcattgtttttcagtctccagtaataacttggttgacatttccatccttatttttcaaataagaatgctttgcacagagtaaggcactgaatgaatatttttgtgtttgcactagaaacaaaacacagaaggaagtaaactttttaaagtagagatggggtctgctatgttgctcaggttggactagacctcctgacctcaagtgattctcccagcttggcctcccaaagtgctgagattacaggatgagccaccattccggaaataattttatactgaatcagcaatagaagaactacaaagtatcggttgtcaggtttcttggccagagcatagttaacatactgagtgccactaccttcctacagcctgtaatatgccacttttgtgactccctatgtggataaatcaaacactttcagctggaagaggctttaaagttcaacctagttcttgcccaactatccatcctacaatattctcactgtgccatcatccaacctgcatttgaatacccccactgacaggatattcactataccccatggtagttcattccactttgtatagctctgactcttagaaagtgattccctagactgagctgatatctatttccttgctcttagaaatgaacaaaacaaatttggctacttgcgttctttgtggccactaagagtgagtcatatcagagtaactttatttcacttagtagactagccaggcatggaaaatgtagtagtgaccatctaaattttaataggcatttgaccaatttgtgtgtggaggaatttgtgctcaatgaatgattggttggtttgtaactggccgaatgtctgtaaccacaggatgctaattgttgaactgagatcctcctagaaggaggtttttaaacagcttgctgggaagaagccttatggagggatgagagctatcttccattcatagggtcccccgtgtttcttcatggtgtgcaatgtgtatgtatctaaactctcaaaaacacactccagtaagagtaataccaataaccttttattcattccacaaatatttgttgagtatctactatgtgtcagatatgattgtagacactgggcatgcagtaataaattaaacagaccaaaaagaaaccccaccaatatctgtccttatggagcctacattctattggagcaggataagagaatactacaggtctcaacagcaaagtaatactagtctttgattaaagatttgaaggcagtgagagaaggaggaaacctttgaggcagaggtagaaatgaaattctatgaaataaaatgatctgtgatactatcacacagcaccagtacaaaatggatatgttttagtccatttgtgttgctataaaggaacacctgagactgggtaatttataaagaaaataaggtttatttggctcatgattctgctggcgggaagactgggcatctagtgaaagcctaaggctgcttccactcacagcgggaggtgatgtggagccgacctgtgcagagatcacacggtgagagaggaagcaagagagaaaggatgaggcggtgctctttttaacaaccagctctcatgagaactaacagagcaaacgtactcattactgtgaggacagcaccaagctattcattagggattccccaccatgacccaaacacctcccattaagccccgcctccaacactgtggattaaattttaacatgaagtttatgggatcaaacatccaaactgtagcagatatgcacacctgaagctatatatatttattgtttttagcaatgttccctgattatgttcttctccaaatcacaggacacttcccacattgttcttttttgtatattatttgggccgttttccatggcaactagtttcacaaagtacaaatgtacaaatgtgtacatttatttttagtactttttctgattacaaaagtaatacaggttcattgagggaaactggttcctatagaagtgaaattctatgaaataaaatgatctgtgatactaccgcccagaaaaaaccactgtttttgtgtttgttttgctttttgagatgggtttctcaccatgttgcccaggctggtcttgatctcctgagctcaagcagtccttctgccttggtctcccaagttttgagattataggcgcacactactgcacctagctgataaccattgtttatgccaatttggaacatttctctccagtctttttttaatgtatgtgtatggatttatttttatagagttgagatcatgcagtataataataaatcataagcattttgacatgtcacttaaacgttatcaaaaacattttaatgtctgtgtaaaattctattatatgtatatgtcagaatgtgttcaggtttttttggctgctcaaataatattgtgataaacattcttatgcttgaatctttttttctgatcattttcttaggaacacaacaaaaaaggaaatttattgagtcaaaggcaattaacattttaagtcttttgatacatattcaaaattattttctaaaaacgttttaccgatttatactctaccatcagtgtttaagggggcaatttttatttttaaattaaattaaattatttatgatttcaataggtttttggggagcaggtggtgtttggttatatggacaagttctttagtggtgattctgagatttttggtgcaaccatcacctgagcaggatacatagtacccaatgtgtagtcttttatccctcaccaccctcccaccccaagtccattgtatcattcttatgcctttgcatcctcatagcttagctcccatttaaaagtgagaagtgggatatttggttttccattcctgagttacttcacttagaataatggtctccaactccatctaggttgctgcaaatgccattcttttgttcctttttatggctgagtagtattccatggtgtatatagacactgtattttctttatccacttgttgattgataggcattgggactggttccatatttttgcaattgcaaattgtattgctataaacatgcgtgtgcaagtatctttttcatataatgacttaatttcctctgggtagatactcagtagtgggattgctggatcaaatagtagatctacttttagttatttttttttgagacggagtctcgctctgtggcccaggctggagtgcagtggcgcgatctcggctcactgcaagctccacctccagggttcacgccattctcctgcctcagcctcccgagtggctgggactacaggtgcccgccaccacgcccagctaatttttttttttttttgtatttttagtagagacagggtttcatcgtgttagccagggtggtctcgaactcctgaacttgtgatccgcctgccttggcctctcaaagtgctgggattacaggcgtgagccaccgcacctggcctacttttagttctttaaggaatctctacattgctttccatagttgttgtactagtttacattcccaccagcagtgtaaacggaatttgtccatttcatcttaacacatggacacgtgatagggagcaacacacaccggggcctgtagcaaggagtggggagagggaaagcatccagaagaacagctaatggatgctgggcttaatacctgggtgatgcgctgatctgtgcagcaaaccaacatggcacacatttacctaacaaacctgcacatcctgcacatacaccctagaacttaaaataaaagttgaaggaaaaaaaagtgtttcttaagggagcaatttttaaaaatgttgctgattttctaggagaaaatttcttcttcttgcttttttatcatgtctttaatacctgttcttcataaaattatccaattatatatatctaatttataaatgtatgtttattggtgttattatttgattaatgaatattttccagtataagtgattgtaagggactcttacaaatttcatgaagcaagggactgtgcctctttgttcaacactgatcctagtgcctgtcccatggtaaatgctcagagaatatttactgaatgaatgaatgaacagggaagttaacatgtcttcatatattagacattcaagagagagggaataataaagatctgagctaaaataaaaggaatagaagacataaatcaatagagataattggtaaaaaccaaaatgtgttttttttagaagattaataaaattgataaatgtctaaccagactagtcaaggaagaaaaaagagagaagacacaaattactaatatcaggaatgagaaagtggacatcaatacatatcctacaaactttgaagcataatacaggccaagcatggtggatcatgcctgtaatctgaacactgtgggaggccaaagcaggaggatcacttgaggcaaggagttaaagaccagcctgggcaacatagagcccatctccaccaaaaaaaaaaaaaaaaaaatatatatatatatatatatacacacacacacacatatgtatacacacatacatatatatatatatatacagaaaaatcataaacaagtttatgccaataactatgacaacttagatgaaatggacaaattccttgaaagacacaaactactaaagtttacccaagaataaatagaggctgggcatggtggctcatacctgtaatcccagaactttgggaggcttaggtgggaggattgcttgagtccaggagttctagatcagcctgagtaacatagcaagaccccatctctacaaaaaataaataaattaactgggcatggtggcaagtgcctgtagtcccagctactcgaaaggctgaggcaggagggttgcttgagcccaggaggttgaggcttcagtaagccacgatcacaccactgcactccagcctgggcaacagagtgagactctctccccagaccgaccaaaaacaaaagaatatagtctgaatagatctctatctattaaaagaaatggaatttgcactttaaaaccttcccacagagaagacttcaaacctagttggcttaactggtgaattctaccaaaaatttgaagaaaaactcatactaattctacacaaattattccaaaaaattgaagaagaaagaacaattttcaactcatcctatgaggctatcagtaccctgatacccaaaccagaaaagaaagacataaaaaaagaaaactatacacaaatatttctcatgaaatacctgcaaaagttatttaaacagtttctagcaatcaaatttaacaatatattaaaaagtacaatacatcacaaccaagtgggatttattccaggaattcaaagttggcttaacattcaaaactcaatcaatgtaattcataatattaacatattaaaaagtcaaaaccatatgagccatctcaatagatgcagaaaaggcattggataagatctgacattcattttttctttaaataaactttcagcaaattaggaatgaaggtggccaggcgtggtggctcacgcctgtaatcccagtactttgggaggccgaggcgggcggatcatgaggtcaggagattgagaccatcctggctaacacggtgaaaccccgtctctcctaaaaatagaagaaattagctgggcatggtggcaggcacctgtagtcccagctactcgggaggctgaggcaggagaatggcgtgaacctgggaggcagagcttgcagtgagccgagatcgtgccactgcactccagcctgggcaacagagcaagactccatctcaaaaaaaaaaaaaaacggaatgaaggtaactgcctcaatctgataaagtgcatcagtgaaaaaactatcagctaacatcatacttaatagtgaaagacaatgctttctttatcagatcaggaataaaacagaatgtccactcacaccactgctatttaatattgtactggaagttctagccagtgcaataagacagagaaagatcaataaatggtacctagattgttaaaaaaaaacaccatctttattaacagataacatgatcacctgtgtagaaaatccaatggaatctattaaaaagctactagaactattaatagcaagtgaatttatcaaggttgcaggacacaagatcaatatacaaaaataagttagttttatatacttacaatggaccatcaaaatatgaaatttaaaaaaataccttttcaggctgggcacggtggctcatgcttgtaatcccagcacaatgggagaccaaagcaggtggatcacttgaggtcaggagtttgagacaagcctggccaacatggtgaaagcttgtctctactaaaaatatgaacattagccaggcatggtggcaggtgcctgtaatcctagctacttgggaagctgaggcaggggaattgcttgaacccaggaggcagaggtttcagtgagctgagattgcaccactgcattccagcctgggtgacagagcaagactctgtcaaaaaaaaaaaaaaaaaaaaaaagacaagccactcaataaaaatgggaaaaatatttgaatagaaacttcaccaaagaatatatagagatggcgaagaagcatatgaaaatatattcaacaacattagtcattaggtaaatacaaagtgaagtcatattgagataatcatacccactagaatgactaaaattaccaagtgatgatggggatacggagcaactggaactctcataaattgctggtgggaatgtttaagcagttaagcatacatgtcccatatgactcattcattatgcaaaaggaatgaaagcatatgtccacacaaaaacttgtgcattagtgttcatagctgctttatttgtgatagccccaaactgggaacaggtaaccagcccttcagcaagtgaatggataaacaaattgtggtataatcacatagtgaaatactactctgcaataaaaaggaacaaactattgacacacatatgaatctggatgaatctcaaaataattatgctgaatgaaagaaaccagacaaaaaagaatacatactatatgattacatttatttaaagttccttggggagataaaaaaagaagataaaaaataaaattctagaaaatgcaaactgatttatctggatagaaggtaaatggttatttgggactggagagagtggggaagaatgaattagcaagagacaggaggaaagttttgagagtaatgcatatgcttattattttgattgtggcgatggtttcatggcaggatacatatgcaaaatgcatcagattgtttttcttgagtatgtgcagtttggtttttgtcaattatacctcaaaaaaactaaaaacaagtagaagagactgtattattccaaaatttctatgtcataaaacacaaagagaggctgtggaaatgttctggcccatcactatcctatgggacactctggttgatggaaattctctgtttgcatcatacaatacagtagtcaggagccacacgtggccactgagcacttgagatacagccagtgcaacccagtaactgaatttttgtttcgttttgttttgtttgttagagacaggctcttgctttgttgcccaggctggactgcagtggtacagtcatagctcatagctcactgcaatcaccaactcctgggctcatgagatctcctggcctcagcctccctagtagctgggactacaggcaggtgccaccatgctcagctaacttaaaaaaattatttttctgctgggcacagtggctcacgcctgtaatcctagcactttgagaggccgaggcgagtggattgcctgagttcaggagttcgagaacagcctgggcaacacggtgaaaccccgtctctactaaattacaaaaaattagctgggtgtggtggtgtgtgcctatagttccagctactcgggaggctgaggcaggagaattgcttgaacccgggaggcggagattgcagtgagctgagatcgtgccactgcactccaccctgggcagcagagcgagactctatctcaaaaaaaaaaaaaaattcttttttcagaaatggggtcttgctatgttgctcaggctggtctcaaatttctgggttcaagcaatcctccagcctcagcttcacaaagcattgggattacaagcatgagccaccacccctggctgaattttaattgttatttcattttaatcaattttaatttaaatagacatattaggcagcatggttctagattaagggagactaagcagatatgaaaacgagatacaatctctgaccctagactagatcctgtactggaaggtgaaaaatgctatgaagaacataattaagtcaactgacaaaattagaatatggatggtagattaaatataagtattgtatcaatgtaaacttatgaaatttataaccatactgcagttatgtaagagaatatccctcctcttaggaaacacggactgtttttaagggaaaggaccagaatgtatgtaatgtaccctcacataggtcagagagatgaccaagtaatcacaggaatggggtaaaatgttaacaaaggtgaatctgggtaaagagtatttaagtgtttcttgttttatttttatgtttgtaactttttgtaagcttgaaattgttttcaaagaaaaagattttttaaatgcctttatatatgactatggtattacaattatattgtttataaagactcccagtgttttaaagctacattatgaagcatttatggacaaaataatacaatgtctgggccaggtgtggtggctcactcctgtaatcccagcactttggaaggctgaggcaggtggatcacgagatcaggagttcaagaccagcctggccaagatggtgaaaccccatctccactaaaaatacaaaaattagctgggcacagtggcaggcgcctgtaatcccaactacttgggaggctgaggcaggaggattgcctgaacctgggcggcagaggttgcagtgagccaagattgcgccactgcactccagcctgggtgttagagtgagactccatctcaaaaaaaaaaaaaaaaaaaaaaaaattactcaggcatggtggcatgcactggtaattccagctactcaggaggctgaagcaggagaattgcttgaacctgggaggtggaggttgcagtgagcctagattgcgacattgcgcttccgcctgggcgatggagcgagactctgtctcaaaacaaacaataataataataataataataataataataataacaacaatacaatgtctggggtttgcttcaaagtaatgtgggatcttactatagagagtggggacatagctgaaagccaagcagccatagattgattctcctgaagctgggtgatatgtacatggatttattatactactcagtccatttttgaaattggacattattgtatattttgcttaacatttccataagtttaaattgggaaaaattggcatctcactcaacattttttcctttcaagaatattgtatatctttcccttactcagtttgtttcctctggtatggactgggaactctcatttataccaaattatttgttaggaagattatttatgcagttcaaatgttccttaaaataataaaaaccctcatcaaaacaaagactccttttaagattccatcagtggtcatttatttcaagcaattttaaacaatgtgtccaagttccactatgggaaaatattttgctcagattctgcaataaaagtttctttccatatttaaaaatacttatacaaaaaatacaaaaaaaagaaaaagaacaaaaacaaaaaaataaaaatacacaagtaaaatttcattatgaaaaatttcatgaaatacttttaaaaaaatattttggtttaaattaatgtatccctagagatcacattctctgtgaatcttgaggtaaaaatcctatttatgtgcagctgagcccaatgaggtaaccaggaggtgttttgaactcagagtatttatgcctttcactcctaggccttatttttcccaggatatgattttgtgtcttattgtttggctcattgtttgatgggtttaagtggtttggagtttggctttgggaacgtttaattgttttaattgcttaaattcgataaaacactcagctaaaccattctcagcctgcagtctggcaaataccccatcttcattttagtggctcttacatgaatcaagacaaggaaagcatgttcacaaatttgtttgttgcataaacgttttgtaatatgtcaggaagtttgtctttgcctagcagaagagtccaggtataataataataataatagaagaagaagaaggaaaggaagagagaaagaaagaaaaagaaagaaagaaagaagaaaggaagaaaggaaaggaaggaaggaaggaagggagagagaggaaggaaggaaagaaagaaagaaaagaaaagagggaaagaagaggaggagggaggggggaagagggaagagggggaagggaaagaggaaggagaagggggaggaagggaaagagggaggaggagggaagaaggagaagaaggaaagaaggagaagaagtttctcttaggagaggccatatctctaaacatggaagtagctttattgggagaccccttcatggtgtgactctttgaggtgtgggattttacctgtttgggaaaatgaagactggaaatccctggttttcctatgctagctttattgattggtttgccattcttgtgatttttccttcttgccagagatagactactgtgcctcatctaatcacggatgtcagcacgagtgtgttaacacagatgattcctattcctgccactgcctgaaaggctttaccctgaatccagataagaaaacctgcagaagtaagttacagtgggagttggagaagggcttgttctgctaaatgctcctctagttagttttcctttccgtgcaaatcttaagcaagatgtgcttgtattcagcattgtgtctattaacattattctcccctttattttactttttggctcactagatcctattatgtggatgatttttaaatattgaataggtctggccattagattcaattagccaagtggacccaagctgaagctcccacctatgtgaaatgcaggtgcagtctccctcccccttattcccatagcattggggtcttggaaaaagaaaagaatgggcccagagatgagaggtagaaggagttggtttcttctactcctacaagataagacacttgacggatgctaagagggaggacattgcagctttattccctttgataggaaagaagaagaaaaatgagactctaggacatcccagcaatattcaaggggtacagggtgtcagcgggttgatattgtggatgtactgagtgcctcaaatgcctgtcatctagcacatcaaagggcatgattggggatctgagcacaggccccagagggcacctgcttaagacaaaccattcctgagagactgctagaatggacggcccacaaggacagagacgattatctttttctcgctgctgaattctcaaaagctcaaagagtgcttggcactcatagatgtgcacaatgtttgctgaatgggaatgagtaagtgaatctttctatgatgtatcatcctggagaaattgaagctattttttttttaattcttcaatcttgttagaaagatagccttttttaggcgtgcaagttgtgaattttttttcagaaagtctttccctagttagtccacacttatgcacactgaattgtttggggtctgctgacaatgtcattcgtagaactctctggagcttccattgagggatgtaattttctgtatgttccttcacccatttcttcctgatggtgtgtacagcagtgttctgcctggcaagactgcgttttgaaaggtttcacatatatcttttttgaaaagcaccatgagctatttaactgaatccagatgagtcacattctgctcatagcacagattaactttcatactcattctagcaagtgctaaactgtgtatagtggcagatggttgcaaatcccggattttgaaacggagcctgtcttataaaactattctcactgccttgtgagggtacaaaccctgcacacattcaagcattaaatgaaaattttaatggagagcattcagaatgtgaaaacaattagataagctatttttcataagaccacacatgcctgcaataggtcagagggccaacttttctggtctggccactcctctgtgctatttacaccttttgctaggagtgggtgtgtgagggactggctgcacccaggggaaatcactcccaggtggactcaaatttgcagacccaaagctcttcagtgggcggtgattagatctggttcagctcagatgctcattgcaagcttcctcatgtgttactaatggaggggaaaaaggaaacaagttaggcttggggccatgggcggaggacattttcttgacgttctgcatgtcttaccaaccatctgagtcccttaatttctgctactccctccacacccttcctggagaggcacttggaataagagaagatccaatgcaatgcaggcatcattatcatgggaaggagaagactgagaaaggaagagcgagtagagagggagtgaccgttttggagtggtctgagcgctacagattggtccccaggtgggcctgtttgcaagcaagctgtggccccgaccagagtccctaatgctcatccatgtatattcagtgggtatagcccctctttagccagggttcttactttttcatccaagaaaaatgaaatttgttcctaaaggccagtgtcctcatcagccctcgcccaacgtcccgcctcatcgttacattttccattgtctttgctgtgaacccaaccctgactcctgaggtcagcctgcaggagcggcccctgacttcatgcttgcactcagtccattagggcagacagctgtaaacggaagcgagtgctcactgtctctctggagcattatgtggatgaaggaagccaagaaattgggtttaaaaatctggagtccgttattagaagcctgaggtctcttgagtgatctgagcattacaaatcttcagcccaggatacagccatttacgtttaataggaggttgatggatgtgggtaattttcaaatctaatatgaaatctatttttaaaggaatttgatgtcatcgaaattaaactgggggaaaaaagatcaaggcagaatcctactgaagaaaagattcttggccaggatttgttcttgctcctcatctgggcacaatttctcctcatggagagtgctatcatcagtttaaggcatgaattattaaggcagtagtgcaaagcacagaaactgcgactgccttgcctgcccaggtagagccctagggccaaatcagatgtgggttcatcccctgtgctgggctccaggatccctgattctggtaccatgatgagtgctctcaaaaattggtgtgaagcccacgggttcgactgagccaagagacgtgacgtccaggcttggcaatgtcactcatattggttatgtgaccctgagcagctactttctacttctcaggacctggatttcctaaactgtaggaacaggacttcctgccttaacaccctgttgcctctccagtttttttgaaacttactatctgtgcactcagctggtatcaaaatgtactacctggggtcactgatctttcatggtttcagtcttacctgctcagggctccaactctttcacaagttagcactcagaaagatcgtttgatttgttttctgacagtcctgtcatctgacctcacagagctttagtggacactctgggccttaccagattaagttgtgtccatcctgtgggtgccatgtcagagcacctatcatggtaccagatacaggatgcacagtaggtcctcaataaatatttagtgaatgaataagtgagtgagtgaatatctgagaagcacacacatgaggaaatatgacaaaagggtggtgagaaggcaaagagccactgttaaacgtctgctaaaaagaaccatttggagaaggttttttttttttttttttttccagacagaatctcattctattgcccaggctggagtgcagtggagcaatcttggctcactacaacctctgtctcccaggctcaggtgattgtctcacttcggcctccctagtagctgggactacaggcgtgcaccatcatgcctgactagtttttgtatttttagtagagacggggtttcaccatgttgtccaggctggtctcaaactcctggactcaagtgattctccctcctcagtctcccaaagtgctgggattacaggcatgagccaccacgcccagccgaaaagggtggtatttgaatagctgcctgccagattgctgggtgataacctctttaagaatctaaatggttttcagttgaattatctcatgtgtaaatcattctttaaaaaaaaaatcttgctgggcgcggtgtcacgcctgtaatcccagcactttgggaggccgaggcgggcggatcacaaggtcaggagatcgagaccatcctggctaacacggtgaaaccccgtctctactaaaaaatattaaaaaattagccgggcttggtggcgggcgcctgtagtcccaactactcaggaggctgaggcaggagaatggcgtgaacctgggaggcggagcttgcagtgagccgagatcgtgccactgcactccagcctgggcgacagtgagactctgtctcaaaaaaaaaaaaaaaaaatcttgcttgaaacattatttactaatttattttaattttttaaaaatgtttttctttttatatttttattgtatgtgctgctgaagcgagagcttcagcatatttttttatatttttaaaatttttaaaatttttttttatatttttaaaattgttacaacatagttgtacctctttttggtatttattttttaaaattgacataaaaattgtatacttgtatacaatatgttgttttgcaatacgtaaatataaatttttcttaaagacaacattggcttttttagtgtggcaaaatatatataacataaaatgtaccattttaaccatttttaagtatctagtccagtggtattaagcacattcacattgttgtgcaaccatcaccaccttcaatctccagaacttcttcaccccaaactgagactctatacccattaaacaataattccccagctcctcctcctccatctcctggcagccaccaatctactttttgtctatgaatttgactattctaggtgcctcatataagtggaatcatagaatatttgtccttttgtaaccagcttatattgcttggcataatgtcttcaaggttcattcagttgtaggacgtgtcagaatttccttcctttttaaggctgaataatattccattgtatctatacatcatcctttgtactcatcctttgatagatccctgggttgcttccaccttttgacttttatttattaatgcagctatgaacttgggtgtgtatacccagaaatggaattgctggatcatatggttaattctatatttaattttttgaggaaccgccatgctgttttccacagtggctgaatgctgggttttaaaaagagagttgactaaagatcatttcacctttccctgatggtgtaatggagtgattcctataggcagtagactgcgggcccttcctgttctgtgtttgtctgtctgtctgtgactggtgttttattgccaggcctattttcctccatcaaagctcttggcttgtttcctggcactcagttatggcctgcacaggtgaggctgctgatgagtttcaggtagatgaatagaaactgcacacagctaacaatatcctgcctctcctcacatgggagtgagctccagagagagtgccaagggtcagtgacacagcaaggtgatgtcttttcttctacaccagccctgcatgttgtgaccttctctccatgcactctgtctgcagccattctgctcatactctgggcatgaagcaagctccagccaccagtcacctgggagggcacgtcacggattctttttttttttttttttaattttttaatttttttaaagacggaatctcactctgtcacccaggctggaatacagtggcgcgatcttggctcactgcaacctccatctcctgggttctagcgatcctctcacctcagcttcccaagtagctgggactacagatatgtaccaccatgcctggctgatttttgtattgttagtagaggtgggctttcaccatgttggccaggctggtcttgaactcctgacctcaagtgatccatccgcctcagccttccaaagtgctgggatacaggcatgagccactgtgtccagccagatcctttaagagaccctttgaggggtccttcaggtctgggtcccattcacatttccatttttactagcagtggatcttgatcaagttattaacctcgctaaacccgctaaacctcaattcctcagctttgaaatatggataacaggccaggtgcggtggctcacgcctataatcccagcactttgggaggctgaggcgggtggatcacaaggtcaggagatcgagaccagcctggccaatatggtgaaaccccgtctctactaaatatataaaaattagccgggtgtggtagcgggcacctgtagtcccagctactcaggaggctgaggcaggagaattgcttgaacccaggaggcagaagttgcagtgagccgagatcacgccactgcactccagcctggatgacagagcgagactccgtctcaaaaaaaaaaaaaagaaatatggttaacaatcacacatatcttgcagggtcaaatgaagttatgtttgtaaagtggttggcacagcatctggcattcagcaggtatttaagaaatggcagcagctatgatgctatgattatcatcactaatgtaactatcagactgccactaatagtgagaaaaataaagatggcatggtccctgctcgtggaactcagtctagtgaaagaaacagactttgaagcatcacagatacaaaacatactacataaccattgtgatgaatgctacgaaagagaggtcctgtagaaagaactgacttcatctacgaggtcacaaaagatgacaaaatgatgttgagctgatcgtgaaggaagatagaggttagccagtgcagcaaggagccactgagacaagagggtgatgtgtcatatctttaagtgatttgtggatgtgagcttcgtcaaataacttttgggcagatacatggtaaaaataaaatctagtcattactttatgatttcagatcatttcccctgtatcagttatggtgctttttgttcacacaaaaccggaaatccaattaatggtgttttaagtcagaaggacttttattttttacctgacaagtccaaaggtggttggtcctatggatggctcagtgactcagtgatattatcaagaacccagactctttctgtctttctattctggcaaagtatgttgcatttacattttcatccttgtcacctcttggttacaagatggttgctgcagctaccagcatcatatccttacactacaagactcaaaggcagaaaggacagagagcagagaaaagcatttctctttatacacttttgtctttttttttttttttttttgagacagagtctcactctgttgcccaggctggagtgcagtggcacaatctcagctcactgcaacctctgcctcctgggttcaagcgattctcatgcctcaggctcccaagtagctgggattgcagacgcatgccaccatgcccagctaattttgtttttttgtttgtttgtttttagtagaggtggggtttcaccatgttagccaggctggtcttgaactcctggcctcaagtgatctgcccaccttggccttccaaagtgctgggattacaggcatgagccactgtgcctggccacctttgtcttttcaggaagaaaaatctttcttgagggcccccagtaagcttcttatgtttcattggtcagaactagggcatattcccaccccttgaccaatgactgacaaagaagaacatggttgccacgctggcttagaccagccatgactcatgcttgggggtcatggggtaatggttattggcaagacaaccaacagtgtctgccacatccccagaaaaagaacaatgctgtgcagttaaactgatccagcccagccaatgaggtcggtggtgaccttttcccgcgacaccagtctcataaagcctctccacaagctcattttgtgtccttttccagttctctatcttccctggagcctgctatgtgtggggtcttatggctttagcattttctaccaggaaaggaattgcttattggctcctggttatgacacagtttccatctgctggcagaaacacagcatggatagagtgaccttaccataggacagaattgcagtagcctggggcagcatcagagatacgcctcctccagtcccatgatactatgccagcgtggtctcaacagagcaaggcgaagcatttagatccttcttcatgaaactgccaacccctgcatccctaaatagctggatattttgcaagatcaccttttgtttattttgccttgtgccgtccaatgtcactgtcagatgtcactgtagacagaagctctctacatgctttgagcccaagtgatcaggttaacctgagagagatactggattttcttagcttttccatctttcttggaaggaggtaggctggggagcgtggctctcaccccagctctcagctctttggccactgactcagttcagctcagctcaactgagccttggcttgctctttggccatcaaagagggaaaatgctggagaatccacaggtatacttcaggtgccaggccctcttttaaacaagctcctggagagcaggagctattttctctgtgtcctgtagctcaccttgtttcctgaagatttagtgaagtttgcctgcctttccacctctactgcaaagtcttcttcaagacataaccctggccttgtcacctccaccaacattctcacctctagtcacctgtttagagccttcactgatccatcctggggcttgcaaagcccgcacgtccagtcatgctcaggtgggccagctccctctgcctcccagcctcatctctctcctcacactccagccatactcagctcctcacagctccccaggcatgcccctcgccctcatccccaggcatttgtgttcactgtcccctcatccctgggcgtttgtgttcactgtcccctcatccccgggcatttgtgttcactgtcccctcatccccaggcatttgtgttcactgttccctcatccccaagcacttgtgttttttgtctcctcaccctcaggtgtttgcgtttgctgtcctcgagtcctcatgttcttcttcctgttgagctcccttacctatggaactcctcctcctccctggggcctcctgttggccttatctcttcttggaagaccctctcaccccaggactcagtgaggcccctgctctgtgctctgcattgtcttttagttgctgtccttgtctgactcctcaccagagcctgaacccattgaggcagggcctccatctcagtcgtcattaaatctctgaatctagctcaaggcctggcacttggctggcagacaaacgaatgaatgatccgtcccggcttgcctcagcaggcagcacccaccagccctctccatgggggctcatgggagccccgaggggctgccatcagccctgggagaggtccagagtctgaaggaaggtctgcccttcttcccctcagggatcaactactgtgcactgaacaaaccgggctgtgagcatgagtgcgtcaacatggaggagagctactactgccgctgccaccgtggctacactctggaccccaatggcaaaacctgcagccgtgagtgtaccctaggggtggggtgctgatggaaggtggggtccactcatgggggcgggcgggttcactagcaaccagttgtttctggagcccaccgggtttcctgatggtctgtcaggtgtatccttccttatcctcagtttcatcacccatagaatgtgactattaatactatcggcctagccaacttgggttgcaaggattaaaagaattaataggaataggctgggcgcggtggctcacgcctgtaatcccagcacagggaggccaaggcgggcagatcacctgaggtcaggagttcaagaccagcctggccaacatggtgaaatcctatctctactaaaaatacaaaaaattagctgggtgtggtggtgggtgcctataatcccagctactcaggaggctgaagcaggagaattactcgaacctaggaggcagaggtgcagtgagctgagattgcgccattgcactccaacctgggcgacaaagcaaaacttcatctcaaaaaaaaaaaaaaagaataggagtaaaatacttagaacagcactgctaggcataagcactcaataaatgttaactaatattagtatttgctgttaagtgtatttactaggtcagacaggtctaatttcaaatccaacctctcccacctactagatgtgtgtgaacttgggcaagttatttaacttctccatgctttgatttcccatctatgacaaaaagcaaaactaatagtcgtattattcccacagggtttttatagggagaaataggagccattttgatatgttagcctggtgcctggcacagggtaaacttccaatcaaggggaactgttcctatcatggagcctgtgagaggggccagtgcctggcgccagactgggacaagaggccggaggggacagaccttggaaagcaatgggctgcagaggctgatctgagagcagaatcaagaaacatgggattttctgagaaggcttgtcttaattttcttgtgtcagagccacaacaaagctccactgggtgatgtaaatgtatgggaacttgcaagctctgccagctgggcggctccatggttttttatgaggcaccatctccacaggtcctggccagcaggataggagcgcctgagtgtggtgatggaccctatgcccttggcatgcgggagagggggcccatctccatgacatggcctatgcagaaggggccctttatgtgcctttccactcagcaagccccacatctgctccctttggagaaagagatagattgtgagtgaggacagtgcagctgttgagccctgggctccacgctgccagcagggaagtttcccagatgaaataagaggtccagggcagtcctcaggaaagcgtggctcctctagtgtccagagagaacaaagtgcccggtaaaggctttctaaggactgatctcagaggccaaagggcttttgaactggaaagtggtgccaaagtcagtgcctgctgtacgttgcctctgcatgtctctgagtccttttgagaggccagcgggaagcgggtctcccattcaacaggagatgccctggtgaccatggatctgtgtgtatcctgcctgtttcccggagtgtcaggtctgccagctgatggccctggcaattttcccagggcaggtggtcctgacctggctgagcccacgcagatcaccagggacatggcttgactgcccctcccagcatgcttccgggggccagaagagctctaagaacggaccacaagagatcgggaccctcccttctctctgggatctagtcaactctaagaaagtacaaaccaagctgtttctgtctcgcagtccttagagaaagccacaggcttctgctttctcagaggaatcagggagcccaggccataaagacagcaagcaattctgaggcgctcactctgtgcaggcaatgccctgagcacttcccatgcataaactccctgcatcctcacagccgccctactgggcacccacattcttgtcgctatttaaacaagggcaaactgtgacacaaagggattaagtcactgtcctggggtcctgtgattaacaaatggcaacactaggatgtgaacacaggcatgtagctcccaagatccagcaagtgttcgcaggagatgcatccaccagtggaatgttctggaaggcactggtcccagactctgcgggagtcaagaggcccacttggcagacctgcaccaggcctccagtgtctgtccagtctctggaggtgcattttctccataagggaaacctgggaagcagcctgcagggctgttagtgggagctgttcaccacagctgtgtgttcattagccttcggcacttgctgcccggaggaccagctgtgcagcattcggatgccaggataggccacacatgcagtcccaggctttggtttgttttttaatctggatgtcctgataatgggggtaaaaaaaatagaaattgatttcatggagaatgacaactctttttcattttcaattagaaatgaaactatatgactaattcttactcagcactacttgataataatagtgtgttcattaagtggttgctgtatgctagctactgttctgagcgctttacataatcaacccctcttattctcaccctattcctataagaaagcaaccatcaacatccacattcacaaatcaggaaacgatggcaaagaggccgtgggactgcccagcatccatagctaggaagtggcagaggtgtgatttgaacccaggtagtttgatgccagaacctgcattctaagcactactctattagctgtgtggctttgatcttgaccttcctgagcctcactttcctctctgtgaaatgggaattgcacctgctctcagaggtgccctgagactgtggattctgtgcgccatggccctggcagagtgctgctgtcgtcaacaccagggacagcattccccagccattggagttgtatgctttaaccttcaaagaaagaaatgggaaagaaggctgggcatggtgtcaggcacctgtaaccccagctagctactctggaggctggggcaggagaatcgcttgaatccaggaggtggaggttgcagtgagccgagatctcgccactgcactccagcctgggtgaaaagggaaagaaaaccaacaagccaggctgattttctagagggatcagtgatgtggggtagaatgacaccttccctgtggcttgttatgcctccggttttgtttttgaatcttggttgctggtggggtattgccccctcggctcctctatgctttcgcgtgtgtgaaaatgcaggagtggaccactgtgcacagcaggaccatggctgtgagcagctgtgtctgaacacggaggattccttcgtctgccagtgctcagaaggcttcctcatcaacgaggacctcaagacctgctcccgtgagtccctccgcgctcctctcataggggaaggtttgcaccaggagtgaaacctatgtgactgcagagggcacaggttgtacttgggcacccctcccctgccccttgctctgctccaggagatagtgaggatgtccactgggactgcatgccttcgagggagggcggggtgagcatgacggtcacttgatccaatcactgtcgcccagaggtctcactgataaagggctgcctggcttttggttttgcaggggtggattactgcctgctgagtgaccatggttgtgaatactcctgtgtcaacatggacagatcctttgcctgtcagtgtcctgagggacacgtgctccgcagcgatgggaagacgtgtgcaagtaagtgtctgaaggacaagcaggacctgcacaggtgttccgtgggtgccggtgtgggtgcgctgccgacgtgtatatgtgcctgtgtgtcctgtctccaggctttgctgggcctgcatgaatgtgtgtgacagcatctcttagccattgagccttggtggctgcttcaccaactcccctcaatcttccttcccccgtgccctgaagtggctttttgctgtttccacctccctgtcattctgaagctggacagagcccttgtcctcagctctctctgctctacccccagccagctagtatggcacatgaataataataatgtggacccctcactgactgctagctgcatgctgggcactgtgctaagcacacatgctgttgcattcaggggacagatgaggaaaaactgtagctcagattaagtaaagagcctaaggtcaccagctagtgagtggtgggttcaaactctgctggctgtgattccaaagtcagtcctgggagaagaggatgctcctgagaaacgctttgccctgctttctgaccccggtgatctcacagcacatggtgaggctggcagtgatgtgtcctgggtacatatttccttgcagctggtcccaaatcttgtctcaattaaaaaaaaaaaaaattgctcccagacctccttctctcctttactgaagaatgctggtgtgtttgttgccctgaaatcctgtttcgaagtggaccaagataaagaatcgaaatatggtcattttgagagaaggaatcagaaatgaaagaaaaggaccaccatttatcttccccagcctgctggtctttctggttatagggccaagttccctgaccactggtataattgtaggcacaacctaatttatccactttttatatcatctattcatctaggcagatgagctggctgcacagctgggcgtgcctctctatgctgcctgtgagaaaatatttccagtttgggacagatccttggatcttagcaaatgggttatccatgttatagctttcggtggctccctgcccagctgcctcccagactgctgctgcagccagctcagggagggatcgggcacagggggtgcagaaagagggtgggtgtgttgaattgcatcgacattgacagcatgccaaagccagatgtaaggggtttgttggtttgtttaattctccatcattttagattattctgagaataagaggagtcattcttctgtccacctcgttcctgtaataatcaagaactgactacaagatggttgtaggaccctacgaaattctcatgagcccttctaaacaaatgcagctccatctcctttgaatcaggtgccccttcctctcccctgcccaggtccacatctggattttgacctgaccacttttaagtgttgcccattttctcatttaaagtgggtttctaaccaatggcacagtggaaccatctacatgagtaaatgtccaacaatgcaatgaatagtgaattttgttatttatatgtggttgtatctagatgagaacttgtgagatagtcagataagtgagaattgtcctcaggaaccgtataggagagatgcatttcacccaccagctgatacatatgcattgagctattcccctaattgaagactttctgcctgtcccagaatgattcattctgactgtcctgtcctgtaataatgggctaggttttcagcgtggccacagctaactgggggttgggatgtgtgttccccagctctactctcaatgacaaagggccagacgacatgactgcacctatttggtaaagccttttggggggcagtcaggcctggctcagcagataagagtgtccttggctctttatagaggcagcctccacttagagctttgatagcaagtggtcttaagaatgtgtcactcaccttctggaaagttctctgaagtgtggaggggttccaggggccctgggatgagatgggcactgctgtgcccctacctcttcaggcaccttgggttctctggcctctggagcgatgtcccctcccttcctccagccccctgaccgcaagctctgctttcccagattttccccagaggcctttttgcctcgggcagttagatgcacagactcagggtgtggggggtcggggaggggatggggcgatctcttttaccagctgcagctgagcagactccttccctctctagacgtttccctgagattgaccttgtgcaagggcatcccagcaccaagaaagactctataggcctgatgtgcatggaccacactgcccactggcctgcaagctgctggaggttggaggtcagaggccaacatgaaatgactgggagcgtgaatggacagaggccacctgtctttttgccccacggcccctggcacagggtccgctccccgcttgataaccttcagtggctctccactgtctcccagaataaatttccattgcactccttgatttggcagagtgcagaaccccctcttccacttctttagcctcaccccaggccctccctgaagccgcctcctgttctttagccaaagtggcaagtcccccattctctgaacaggcctggtgccttccagcccatcccaatgtcacccccatgggtaacctcctctcccacctgataggctctcctctcctcctcccaccccaggctctgctggggcctctctgcagagctctcctgcccagcctcaccctggggctctctgtgcacatgtctgagaaacagtgtggcagagcagaaagagtactgaactggaagcccaaagactgggtttaaatcgtgtcgcttctaccctaggcaagggaattggccctcttggggtctgactgctcatctctaaactgagaatggtcgttgctgcctttcaaggccactgtgtggttcagggagactgctgttgcagtgctatgtgaacttgtggactgccgtgacccctaaggaattcctcttcctctctcccctcccagcatcagaaccccctgcactgaggagactcagaaggtattgctgcctggaaacccatctgccagggccaggcctgctctccttggaggggccccagagacacacaactctggaagtgggctggactcaggagtccaagggctgtcctatgagggaccctcccttctgcaagcggaggacaccaacggggatcagagccgtcagcctagggcactgggggatctctgctggtgatactcccagtccaactaccacaggcagatctgcgagggcctgttaggctgcctgaggccctgagcttggccttccagggctgaggcaggcctaggcgaggctaggggagtgtcttagtctactcgggctcccatcacaaaataccatagactgaatgttgtttcttaaccacagaaatttctttctcacagttctggaggctggaagtccaggatccaggtgctggcatggctgggttctggtgagggccctcttcttggtttgcagacagccagcacccagctgtgtcctcatattgcatgggttgtagggggtgagagagcaaaagagtgcaggcaagttctctggtgtctcttcttataagaacactaatcctatcaggtcaggatcctgccctcacaaccccatctaaacctaattacctcccaaagactccacctctgaataccctcacatcagggttagggattcagatgtaaattttgggggaaacagtctgtagcagggagtagggggaggggaccaccctcactctcatgtattcacattacaggcttgatgcaacagaaggaaactagagattttcccttattttgtgggaaacggacacatggaggaaagtgatgcctccaagctggccctggtcggggagtcagtggcagagccaggaccagagccgagtcccctgattttaggatcttttgcccagtgtgagatgccctggaaaagcacatctcagttcagctgcttcttggtttgtctgagaaaaagcctatattaagttagcaaaggattggctgctgctagttttattacgagaaaagccaggaagcagtgtaattctatctgtcggcttctggttactgtcttggcagatggccactgtggctttctctctctggggttggggttggttttaacaacgtcttatgtggagccccagacgcaggattgctgtctgtcatcacggcagaggtgcaagtccacagaacacgttgccccactgttgctgcgccacagacttacgtgactcacctgtgtcagcgtgcagggctgctagacagggaccctaaagacccgtgctacatcctaaaacttctaatcatcctgagcacacgctgcagaatccattcacgatgagggtttaattaaacacataggcctgggtccttatgtgtaaaaggaggagaatccttctttgagaggaaaaatgttttctttctccctcttgagatttcttacatcctcccacctatttcacttaagtgatggctcctaatggagtctgtctttactctcctctctgggtttgaatctaggtacttccttaagcgcttggttcctttaccctcgttctctacaaatatttactgtgtacctgcattgtgcggggtgctggggatctctggggttgatgcagattcggtttgtgccctgacagtgtttaaagcttctcggggaagaaggatagcagagacagcgtccattccttatggtgagagtggtgatgtgagaaggatggagccgtgggagcaccccctagtctagagaaagagaagtttaatccaacacccagaggagggggctgtgggagcctcccctagtctagagaaagatgtttaatccgacacccagagagtgagtacagtgagccagccagagatggaggggaaatgcttcactaggggccagagagcgaactgcaggaagttctgtgctctgagtacggggtactgaatgcaagagggaggcggtgggtgagaaacgagcctggggacgccggcgggacacatcacccacctacagccttcagagacttcctggctggcctctcttgagaaaatgatttttgtctagtttgtcttctgagaatctgccaggctgcctcagcacactcccttaagctaggatgatctgtggatgtgcagctggaccagggacacggaggtctatttgaatatagtcccatctctgcccccaggacagctaagaccagtcacctctgaaggttcagggacattgggaaagtcacttcccctctgaccatcagttttctcatctttaatgaaggggttggactagttcatatccaatgagttgaacttccagcacccaaacaaggatattgcctggctcagataagtgctccgtaaacacttgctgaatgaatggacttactgtggtgcccaccatagtctcccaggctgaagacacccagtggtactgagtcaggggtggtggctctgtttgcctgttaggggaccactgaagcattttcctataggggagtatctttgccctgggtagaaactgactccaagttggtttccagacttggtggatagaaagctagcgcctatggtcaggaggttaactatcatccacctttggcattctctaatttcccatccacggttctttgaatttataagtggcccagaacatccctgaagggcagaaactggacattttgctgaacaaatgtgagtcgtgcattttgcaaggtgggtgtgtgggagagagtgggaagcctagctggccacaaacatccacacatcccatggggttcttatttaaaacatctgcacaaaacccctgtgaggtggatctaattaccctcaattttcagaatagcaaactgaggaaatgtttccttttgttcaacaggtctttcctagggatctgttaggtgccaggcattatggccactgccaacatctcacctctgatgattcgttgaaatcatctatggggctaggaaaaagtctaaaggcccaggcagcatcccagaaaccctgaatcagaaacagaaacagagactgtcttacattgttggtgagagtagagattgaaataatctctttggaggatgacttggaaatatttatctgcctttaagtattcataccctttacctaggcaattctgcttctggatgtgtaactttcaggtatgccttcacattgtacataaaactacatgcacaagaatatccattgcagataaggtgtggtggctcatgcctgtaatcccagcactttgggaggctgaagcgggaggatcacttgaggccagaaatttaagaccagcctgggcaacatagtgggaccccatctcaacaaaaaatatgaaaattagctaagcatggtggcatgcacctgtagtcccagctactcaggaggctaaggtgggaggatcacatgagcccaagagccaaggctgcagtgaactgcgatgacaccactgcactccagcctgggcgacagagcaagcctgtgtctcaaaaaaaagaaaaaaaagagccttagctgaagctaggaggacaggactgggcacaagggaagctccaggaaggaagggcttaggggtctgtctggattatggcttgacaaggttgacgtgaaagagctatagctattttattaccatggaaaatggagtagtagtagtattataaattcacggtagggggaaaaaaaaacacctcacctccatggccatccagttgtctatatcatggatcactcaactctactttccactcttacaccatgtgaggaactatcccaaaccatcaggaaatgttctgcattaatagtgagtctagaatttgctgagaaaagcaagtcatgctcagggcaaacaggagggtccaactcggctttgagcctcctctgcagctgtaattgcagttatcaaacttttcccattcttcaaagattttggcagtgcttctccccaaagaaattcccttcacatttgaaagcttgctgtagaatatagcaatgtagtatagtcagaaaatacggggatttatttataagattacaatttttgtctggttctttctcttgttaacaattggtcttgacaagccatcagccttcccaacccttagtttccctagctggtgagtgagaataacaacagctgccttaactaacccaaaggtggttctgaggagtcctctccagagagatactgcaaagatgctttaccaaaaaaagtgtgtggtttgtgcctgattataaaggtcattatgtgctttggggcctttatttaataattccgattcatgtccattttagaaattctactcaatctgaaaggattgagttaactttcagaaatatgtagggttcttataaaaagtcaccactcacctatcctcagtattaagcttttaaagtaacagcctggttttcacaggttcacaaaccttctagtcccccagaagccacccagccctgtaagatggcaatgccatccttcagttgctcagtccagcaacctgggagtcttccttgactcttctgtcctatccatatgggctctttgtattaatccatgaacaaattttatagattctaccttaaaatacagccagtctgaccacttctcaccagcctggtctgggccaccaagatctttgcacagggctgctcccaggtgtccaagctccattctgtgcagagcgatcctttaaaaacaaacccatatcatgccactccactgctcaaaacactgcagtgactgcccttctctttcagatctgacccccactgtgaaccccacatggtctgccccagccaaccttgctggcctcatcccctgccaggctcccggatgctccagtcacagtggtctccttgcctttcctgaaacacaccaaccaagcagctcccgttgctgcagtttgcaaatgctgttctttcttgctgataatgctctttcccagacaccaccactcacttcctgtctttctgcagggctctgctcagtgtcaccatatctgacacaccatataatataacaagccctccctactctccagcccagtagccactctccatccttctatcctgctcttcctccatagcactttttcccacatgacatatcacatatttgtctgttttccacgcatccctcttctcctgacacctgctgccaaatgtaagcttcacaaaagcagaaactttgtttcgttcattgctatatccccagagtctaaaacagtgcctggctcattgcagggactcacaaaatatttgtgaactgactgaatacatgaatgaattggttacctaagtgtaatatatacatacatacataagtagatatgtaaataagttgatattatagttacataatagccagttaggttaatcttattttctaatatttacaagtaatttatctctcattctgtaacttgtattctcatgttttttgttcatttttcttgtggagatgatttatattgtttgatttttatgtgccatgtgtatattaagaatttttgctcactttgggagtccgaggtgggtggattgcttgagcccaggaattcgagaccagcctgggcaacatggtgaaatcccgtctccacaaaaaattagcctggtgtggtggtgcacgcttgtagtcccagctatctgggaggctgagatgggaggatcacttgagcccgggaggcagaggctgcagtgagttgagatcacgccaccacactccagcctggatgacagagtgagaccctttctcaaaaaagaatttttgctcatagacatgctttatattctgaaatgtgtactgtaggataaggcactgttttaattcaaagtgtctgaaatgtcttttatgattgaataagccactaatatatgagtcattttcttcttctgtttctctaattcccatttgattctcagaattggactcttgtgctctgggggaccacggttgtgaacattcgtgtgtaagcagtgaagattcgtttgtgtgccagtgctttgaaggttatatactccgtgaagatggaaaaacctgcagaagtaagtttgtactggagctggctcctactactatgccagaccactgtgtgaaatcgctatccttatctctgtatatatcagttcctctcagaagtcaatgccacacagcaaaatgtaatgtagtgtcctggataggaccctgaaagagaaaatggacattagggaaaaaataagtaaatgtcaataaaatatagactttagttaataatcatgtatcagtatgggtttatcaataataacaaatggaccatactcatgtgagttgttaataatagggaaaactaggtgtggggtatattgcaattctttgcgctatcttctcaatttttgcgtaaatctaaaactgtcctaaataataaagtctattaaaaaaatggacaaacaaaaaaagtcaatgccagagctactactgaagttcttcacttatatgctctgtggcaagaaacagtggtttggcagtatactctagtggaaagatggacagtcagaaatccaagattcagtcaacctctgtctctgccatttattagctgggaaagttgcctaacttctctaagcctctctgcttatttatctttaataatgttgttgttgttatttctggtagcacaaatccctcccaaagggcaccttgtgatgaagccagttttgcctttcagaaggcaaagcctcttagatggggctgcagccagccagcccaggacaagcagccttagagtgaattgctggtgtaaatctcaagacacatctctgaataatcaaaggggagtgtgtgaccctggtttccatccatatcagttatctttttctcaacgtctcaaagcactttataaagagcaactcatgttgacacttttggaagaaaagatgggtaactggaataattactctctcattttttggacagcacagctaagactccaagaagttaagtgattctcctaagtcatacactatgttaggcacaaagccaaagttagatttcagtgctgctaatctaaattgaggtttaatctcctaaggaatcatatcaagtgtttccattctgatatcagaaactatgtctacagaaagttgatgatggactgcattttaacactaaagtagtgctggtgaacgatgatggtgaagacagtgaaacagtttgaagggttagcccgaattagagccgctaaactttgttctcaattgtaacttcctgccccatggaccactgagctcaggtggcagatagaatccagtagctgactccagtggatgggtcctccaaggtgaagtccatgtgaaatgtatgttgttgaaattgttgtaacttgctctcctgtcttcagggaaagatgtctgccaagctatagaccatggctgtgaacacatttgtgtgaacagtgacgactcatacacgtgcgagtgcttggagggattccggctcgctgaggatgggaaacgctgccgaagtaagtagcctcgaggtggagaagaacttttccctctgtggactcagacagttagagaagttcatttaatccttaaagtcctcctttattaccactgtcacaagtgtcagttcctgccttgggtgctctgaaagtgtttagctagagatcagttcagtagccccttgctttttcgggaatttctcagtcaaggcctgagttttgggttctttgcttctcttcattttctgccagccatcagccctttccacagtagctgtgtgggtgcccggaaactcgcacagtgctagtcactggactgaattagaacctctgccagcaatcactacaaggactgaaggttaattacagagctttctcctcttggcagaccgtaaaagtaagggcaaagggtgaaagggtgtattcgtccattttcacactgccgataaagacatacccgagactgggcaatttacaaaagaaagaggtttgatggactcacagttccacttggctggagaggcctcaaaatcatggcagaaggtgacgggcacatctcacatggtggcagacaagagaagagaacttgtgcagggaaaccccctttataaaaccatcagatcttgtggagacttattcacaatcagaatagcacaggaaagccccgtccccatgattcaattacctcccaccaggtgcctcccacaacacgtgggaattgtgggaactacaattcaagatgacatttgggtgggacacagccaaaccatatcagagggatttcctgtgggttttttctattatttttatcatttgcttctataggtcacccagaacaggctctgagagtttcgttagaaggtgtattccccagagttctccagagaaacagaccttctctatgtatatcttcatcttctattatatataaatataatagaagacatatatataatatatatatgtcttctatggtctgttctatcttctatttatatatatcatagaagatatatatatatatacacacacatatatatgtgtgtgatgtatatatgtatactatggtctgtttctatcttctattaatatatcatctccacaggaaaaatggacatacacacacacacacacaaacacacatatattgtgagggaggaaaagattggttgattttaagggattggctcacacaattgtcaggggctggcaagttctaaatctgtagggcagcctggagacccaggcaagagctgatgctgcagcccaagtctgaaggcagtctggatgcagaattcccttttcctctgaggacctcagtctttttctctttaggccttcaagtgattggatgaggcccatctacattatagagggtgatctgatctgcttcactcaaagtctactgattaaatgttaattgcatctaaaaattagctcacagcatcatttagactggtgtttgaccaaacaactgggcactatagcctagccaaagtgacacatcaaattaaccttcacagtacccaaaggaacagagggatgtcatacgagctcagtgaggtgggcattaggagagtacagagcagggatttttccccaccatgagattctgagctggtaattccctattttggggggaggggtggttgacaaagtctacttgcttttgtgacactttgccccagtgggcaaaataaccctttttcaattaagtcaaaataagttcagttgctttgaggttgatttttgggaatttcctcacagactcctttgagataactggggatattccacaagccaacaaggctgggttggagggatctcaatacctcgcttcttcctccaggaagagggactcctacctttagcaagaagttctgtgtgaatgactgacacctaggatgcctgtggtaccctggcctaactctgcagggattcccctcacaactgcaggtccagcttcacactgcagtggccctcttgtggagattttgtctataattctgcccattgtgcctgtctgcactgcttgttcatgcttttctttttgtttgtttttgttttgagacagggtctcactctgtcacccaggctggagtgcagtggcactatcttagctcactgtaatctccacctcctgggctcaagcgatcttcccacctcagcctcctgagtagctgggactacaagcgtgcaccaccacacccggttaatttttgtattttttgtagagacatggtttcaccatgttgcccaggctggtcttgaacacctgagctcaagaaatctgcctgcctcggcctcccaaagtgttgggattacaggtgtgaaccaccatgcccagccctcatgcttttctttctgcaaacatctgcacactcacacacacactgtttattcattcaacacatttattgctcagtaaattgaacacaaggtacaacttctacctctggaatttgatcctaaatcagatttcaccattcctgcttcctagagggatgtgttctcactgattccaattttgtgtgaagcctctccttttaaggggtaatgacaggaaagagccataggctctcatgctatggaggagcactcgggagacagctgtgtcatcaacctgccagatgaccgtgggcagcagtgaagctctctgagtatctaattcttcattgataccttgagaataattatccctgtcttccttgtctcacagggtgttgtgagggttaaagggctgtaagtacttcgaagagtttaaattacctcacacatgagaaatgttcattagacaatctgaactggagtgtttgggatgtctgtggcaaaagaaattagaagctaaagcacatctaataataggatagtaagtcaaggacacctaatcacccatcgtaccattcagactcatgggagctagagctttctgagaggagctttttccccatcctgagtatgagactgcaaaagacattatgaaggaggtttgaagagaggtgtgttttctttaaaagagattacttccacaatctctactcacatgactattcaattcacctcatttctacactgatgggattgttcaactccctacattttcctcagggaaggatgtctgcaaatcaacccaccatggctgcgaacacatttgtgttaataatgggaattcctacatctgcaaatgctcagagggatttgttctagctgaggacggaagacggtgcaagagtaagtgatctgaacttggctctctgctttaattttgttttggagcaactgctttttggagtattttcaggcaacaaatccctcacctctgcttctcccataaatataaatgcatatgcacaaatacagaatggggaagagagggcttaactgcagcacctgtgaaaacactttcggttttaattgacagtaaattcattatcagccaagaggctagggtgatcgtaggctgaacagcaatgtctgcatgagggaggtggagagagctgtgctctgctctgtgctggagaattacattcagttctgggcatggtactttaggaaaaaagagatggatcaacagtttaaacataaaaaaaaaaaaaacacaaaagagcaaaaggagtcttgagagaattattttttaatctgagagtagagaagatctttctaaacatgacatgaaatttaaaagccataaaagaaaaacaaaggaaaatatctagtaagagagtaaagctgtgatacctttttttaacctattagttaacctattagttaccagagatcaaaaagtttgattccttatgttggcaaaggtatattgtagtagggaattataaatggatcagtgagtgtctgaattggtataacctttcagagggcaatttggcaatgttatcaatccagttctagaagtttatcttacagatacgtgcatgtttacaaagccatgtatacaaggatattttatacagcactatttgtagcagcaaaaaactggaaacaagctaaatgatcacccatgagcctggctgaataaattaaggcacatctatgtaataaaacatgatgcagctgttaaaacaacaagcagctctggatgtatccccaagatattttaagagaaaaaagcatggtgctgaatgttttttatagtatgttaccatcgatatattttgtaaaacactctaacatacagtctctctttctctatatatnnnnnnnnnnnnnnnnnnnnnnnnnnnnnnnnnnnnnnnnnnnnnnnnnnnnnnnnnnnnnnnnnnnnnnnnnnnnnnnnnnnnnnnnnnnnnnnnnnnnnnnnnnnnnnnncacacacacatacacacaccctttttctaatatttaagttttgttccaaatgcatgtattattttttagaaaaaaataagataaacacgatttagaaagaattaagcagcatgatcttgtgaggaagttcagtattatgttaagcagaaaaaaattaggaaactggggatctttgtagaaaaaaattttgaggtaccaaataccaatgtgactgtcatctcactcatgatttgtatgatacccccaccccaccccaccctaccctggaaagaaaggacacttggagaagctacagcttagcacgaggacaaagaagctttctaccagggaagctgcatgcctaattagttcagagcataagcttcagctcagacagatctggatttgaaccctgattcatactacccgtgtgaccttggtcaaattatttaatctcggccgggcgctatggctaacgcctgtaatcccagcactttgggaggccaagacgggcagatcacctgagatcaggagttcgagaccagcctggccaacatgacaaaactctgtctctactaaaaatataaaaattagccaggcgtggtggcacgcatctataatcccagctactcaagaggctgaggcaggagaattgcttgaacctgggaggcggaggttgcagtgagctgagattgctccactgctctctagcctgggcaacagaggaagactccgtctcaaaataaataaataaataaaataaataaaatacaaaaattagccgggtgtggtggcatgcacctataatcccagctacttgagaggctgaggccaggagatggaagttgcagtgggccgagatcgtgccactgcactccagccagggtgacagagcaaggctctgtctcaaaaaaacaaataaacaaacaaaaattatataaactctttgagtcccagtttccccatctataaaataaggataataactcacaaagccatcacaaggaatacattagatcgtgtatccaaaggtgctgaacagccgggtgttgtggctcacacctgtaatcccagcaccttgggaagctgtggtgggaggattgcttgagctcaggagttcaagaccagcctgggcaacatggtgaaaccctgtctctacaaaaattagaaaaattagctggttgtggtggtacgtggctgtggtcccagctactagggaggctgaggtgggaggatcacctgagtgcaggaggttgaggctacagtgagttgtgattgtgccacttcactctagcctgggtgacacagcaagaccttgtctcaaaaaaaatttttttaataaaaaataaataaaggtgttgagcccagtgctcacacacactaagtgctcaaaaaatgatcactattacgattcacaatagtaaagacatggaatcaacccaaaatgcccatcaatgatagactggataaagaaaatgtgatacatatacaccatggaatactatgcggccataaaaagaaatgaggtcatgtcctttgcagggacatggatggaactggaagccattatcctcagcaaactaacacagaaacagaaaaccaaacactgcatgttctcagttataagtgggagctgaacaatgagaacacatggacacagggaggggaacaacacacaccggggcctgttgggggtagtcgggagtgagaacatcaagataaaaagctaatgcatgtggggcttaatacctaagtgatgggctgataggtgcggcaaaccaccatggcacacatttgcctatgtaacaaacctgcacgtcctgcagatgtatcctagagcttaaaataaaattaaatttaaaaaacaacagacaggccaggtgtggtggctcatgcctttaatcccggcaccttgagaggccgaagcgggcggatcacctgaggtcaggagttcaagaccagcctggccaacatggagaaaccctgtctctactaaaaatacaaaaagtgtccaggtatggtagcgtgtgcctgtggctctagctacttgggaggctgagacaggagaatcacttgaacccaggaggtggaggcagcagtgagccaagatcgcaccactgcactccagcctgggcgagagagcgagatgccatctcaaacaacaacaacaacaacaacaaacaaacaaaatgatcactattgtaatcatcaacagcagaggtgtccaaagatggggctttcgtggtaaggtgacaaattcctcatcaggagaggcattgaggcccaggccgaatggtcactgggtgaggatgctgtaaagaggatgtaagcaacagcagggctggagtagatgatctttaaagggcttatccatgcctgaagttctagaactttctgaaaattacgttctgaaagcaagtcacagctccattccagtcttatcaacttaactaccaaaaagaaaatgcccaagaaaagtgggaattaacctctggcaaaaaaatagtctaataagtggggctgtccttcctgtgtctgaaagcaaatacctgggccctgctctccctgatgcttttccactctactttgttttgtgtttcctggagaagccttctggatgccattctatgtgtgggggttgcaagtgctagttttgttctgtaagaaaaatgtgtacagaaaggaggagaaaacagactcactgctggaaaattatttcagtatttttgaaatctgctgaagagccacatgcatgctgcctgagtctttttttggttcactcaggaacagactatgaatgtaaatgaagctttgagttggccttttcctctttcactaataaaagatcgataggttgagtgatgaggaaaagcacttaatggagaaacagaagaacccaatcccccaacatgtgcgcactcacgcacacacacacacacacaccacacacactatgacgttaagcattttatactggccaggcatagaaatggttttgcatgtgtgtgtctctacatgcttatattgttgtgcctcacttttaaagattagacagctgcttgatatataaaacagaatgtttatcacagattgtggattgtttgaaatgagatcatctggcccagcacggtggctcacgcctgtaatcccaacattttggaggccgaggtgggtggatcacaaggtcaggagttcgaaatcagcttggccaagatggtgaaaccccgtctctactaaaaatacaaaaattagccaggcatggtggcatgtgcctgtaatcccagctacttgggaggctgaggcaggagaatcgcttgaacctgggaggcagaagttgcagtaagccaagatcgcgccattgtactccagcctgggcgacacagcaagactctgtctcaaaaaagaagaagaaatgagataatccattttggatctgtccatttttcttttgcagtcctaaataacaaaaagcctctccacacccaaattgcttaacataaagcttttatttctgcttactatcgaccatctattaatagttgcctgagaccaggtacagtggctcatgcctgtaatcccagcactttggaaggccaaggcaggtgaatcgcctgaggtcaggagttcaagaccagcctagccaacatggcaaaaccccgtctctactaaaaatacaaaaaactagccaggcatggtagcgtgtgcctgtaatcccggctacttgggaggctgaggcaggagaatcacttgaacccaggaagtggaggttgcagtgagccaagatcacaccattgcacttcagcctgggtaacagagcaagactcaatctcaaaaaaaaaaaaaaaaaatgcctgaaaagcttccatgtaaagaatttatggtgataactttttttttaattttgttttttttttttttacggagagatgcagggtcttgctctgtcacccagactgaagtgcagcggcacaatcatagcttactgcaacctgtaattcttgggctccggtaatctttctgcctcagcctcccaagtagctagggctacaggcatgcactaccatgcccagctaatttttctttttttaagaaagacagtcactctgttacccagggtgttcttgaactcctgtgctcaagccatcctcctgcctcagcctcccaatgcactggggattataggcgtgagccactgcactaaggctaattattttgtaagctttaataggtcagtagggtacttacaggtgtgctacccaatgaacatcacctcattcacttagtctgtcaccacacatttactgaacactttttttgtgccaagtattggggggtggggcacaaaaatgaatgaaacacagtccctgctgaggaggaactcacagactggaggaggaaacacatcattaaataattattgtacaatgtggaacactatatagagtacattagattgtatgcagcttggtgttagggattgtgtcttggtcactattgcaatcctgctatgcccatggccttgtacaaagcaggtcctcaataaatttttggttgaataaattagtagtgtttggggtatatagaaagcaatacaagctgagttactaggaaggctccccagcagaggtgatggctgagctgaagaaatctctttctccattgactgtcagaatgccagcactagggtgatgtcaccctcctaaagttctaggagtcttttgggtattgttagacccttcagtgtactctacacccagctcctcccagacctgtcagtgttccagggtacaatgtagacttggtttcctagacaattgtatatctgccgttttgcttgtgaaaaatactatttttatcaatatgacaagccaaccataaaagtatacgtgaaaattattgttgcttgtggccctcccaacaactcatctatcctgtgtattatctaaagaacaaaactggttccccaaagtggttatgcctccaattgaagcatcattttattctactcttgtgcataaatgattttttattcaactatgtcaactttccttctgttcatatagaatgcactgaaggcccaattgacctggtctttgtgatcgatggatccaagagtcttggagaagagaattttgaggtcgtgaagcagtttgtcactggaattatagattccttgacaatttcccccaaagccgctcgagtggggctgctccagtattccacacaggtccacacagagttcactctgagaaacttcaactcagccaaagacatgaaaaaagccgtggcccacatgaaatacatgggaaagggctctatgactgggctggccctgaaacacatgtttgagagaagttttacccaaggagaaggggccaggcccctttccacaagggtgcccagagcagccattgtgttcaccgacggacgggctcaggatgacgtctccgagtgggccagtaaagccaaggccaatggtaatatggggtggaggtgcggtttacaccactcaaggttcaggtttcttaaactcactcagtggtctcagctggccataagggtaagcttctttgagtgtacagaaaggcctcctggcaactgccattatacatctttactaccctgccacctagaagccttaacaggaccccacaggagttaaataaagtgctcaggaaggagtctggctactagaagggtaggctaagctgaccacaggcgggtatcctctcactgtgatttactagccagtgtgtgatctccagtgtaagaatcgcctagatatacacaatagttccgaaacactggtcggcttgctctagaatcaactgaagactttgttaaattgtttctgatgggaacttttactgtgtatatttattcttgtattttttaaccaatacttcaagcgagcattctgaaaatgcaatagcccctagggtggataatactcttgtgtttccaggaggcaaagttagcttttccgaaaatcaaatgatggaacagattatgactctaagctcttgttgctcagtaaagcccagcctcttctctgaggttttcctgacctgagggttacttcagttgtacagatgtgaagcgtgctcgaggagtatgacccttggctaaaggaaacccaaaaggtaggataattggtagagacagtttatggtgaagtttctagattccttgagggagataagaaaacttgaggttgtgaactagtttgcttgaaaactgctttttttttttgagatggaggcttgctctgtcaccgaggctggagtgcagtggcgcgatgtcagctcactgcaagctccgcctcccaggttcacgctattctcctgcctcggcctcctgagtattgggtactacaggcgcccgccaccacgcccagctaatttttttgtatttttagtggagatggggtttcaccgtgttagccaggatggtctcgatctcctgacctcatgatccacccacctcagcctcccaaagtgctaggattataggcgtgagccactgtgcccagccgaaaactgccttcttaaagtacttgttgaggacacactgctttagcaagtcctgtaagaggaaataaggtatgcacagatcaaggcctcatctaagactttatggacccagtgcctagatcaggcctggcacacagtagatgtgtgacaactacttgctgagtgaatgaagaaagaagtgagagtactggcagtcccattggtgaactccattcctcctcacagaaaggctggttcacatcgacattcactcgctgtctttgtgaaggaggtcattttattgatactgcgtaccttcctctttttctagcccaagagtggtagccacaaagtgtcctgccctgaatcatctggatagattgtaaaactggctgttcacactagcctagattgctagagctcatgtcaaactcataggccccctagtctgcattcttaaaaagaattaattaggggaagcatcttagtctccagagacagtggttagccctttcatctcactgagactaatctaccttaccctttgctccactcaaatgtctctacacatcacacaaagacaggtggtagcagaaactgatgtttacttgattcttgaatcaacaagatttatatgaggtgacatcctcttatgaatttaactagtcttatgtatagcaaacagaatcttaaaatagtagttatcctttttaggaagtcgtgcataaaatcactgggctcccggacaaatatgctgaacttggttagtgaccttacacagactcagaacaaggcatcacaactcttgccccttgtcttgaagagccatttttaagtacatttttaagaatctagtctaataaattagctagaataagttatcagtgctgaaaaatgtttggactccagcagaacatattcttattgtgttttactttcaaatgaagagtatataggggaagggagtctaaggattgagtaagaaaagcttttaaagcaaacgcatatccctgttgaaatttaaggctgatcttgggtttgttctttttcctgactttaggggtttccaatggtctgtagattatccttttcagcttagcacttcctcacaaagttgtgtcatcttagcagaagtgggcaaaaagcagcttcacttggcctcaggtcacttacgtttcctaccctgtagctttgagtagaaactaggttattaggtcataaattgacttgattcttagaattcttccagaagagattcccatttagcaagccataaaatagggctcatttctatgaatccagaaggctaattcagggggaagttgcagatttgttaaatggcccagcccagggctgagcaacaggttagtagtttagttccccagcgtctcccagatgcctcacttctctcttggatccctcccttttgttcataggaccaaaataaaaatggtagaaaaataaaaaggaaggttggcatggactcttcaaatcataccacttaacatctaactggctttgggtgcagtacacacaacttccagcccctgggaacacaactctaactaacttgctcttaatttttcctgcaccctaggtatcactatgtatgctgttggggtaggaaaagccattgaggaggaactacaagagattgcctctgagcccacaaacaagcatctcttctatgccgaagacttcagcacaatggatgagataagtgaaaaactcaagaaaggcatctgtgaaggtactatagcttacgccgaagaccttagcaaacaaggcagcatgaactcctttttttttgttttttgagatggagtctcactctgtcatccaggctggagtgcagtggcacaatctcagctcactacaacctccgcctcctgggttcaagtgattctcatgcttcagcctcccgagaagctgggattacaggcacccaccaccacacccagctaatttttgtatttttagtagagatgaggtttcaccatgttggccaggctggtctcgaactcctgacctcaagtgatccagccaccacagcctcccaaagtgctgggattacaggcgtgagccaccgtgtccggccagcatgaacctttagtgataaattctcaaccaaaaaaaagtgtctccttcatgggcagggccagcaatgcctagaaacagtacaaaaagaagggctgggcaccatggttcccacctgtaacccaaccattttgggaggctgcggtgggaggattgctcgagcccaggagttcgagaccagtttaggcaacaaagtgaaaccctgtctctgaaaaaaaatttaacaattagctaggcatgatggcacacacctgtagtctcagctacttgggagactgagcggggaggatcgtttgagccctggaggtcacggcttcagtgagccatgattgcgccactgcactccaacctgggtgacaaagcaagaccctgtctcaaaaaaagaaaaaaaaaaggtgggggaaacaggggaggtgggaaagaaaaaagtaatagctaccattgtttgcgcccttgctctgtgccaagcagtataataagtgttttgacacaccagcatgcttcatcctcacaaacaccctagagaaatgatcatttaactaaaaatcaatcattatataaatcaggagagctgaagtgcaatttcagaatatacctataattggagtggaaaggggcgtacctagttcttccaagcccactgttaaaattaatgcctttctgcatggactacttgtttacagaatatcagactgccctttagacttcagattttgttatgcatgcttttctccagtttactaactgtgccagatatgcttacagatagcagttctgcctatttttccttgtactcatgtccccggctcaccagttagatcccagtctaagtgctgtgtcttacccctctagggaaagaactcttgagatgaggggtaacagggagggaaggcctttcagatttctgagtagagaatgttttgcctcttgattgtttcatgcaagttaaaatgcctcaagtggagctgctgccactgcaactaaaatccctcaacaacttcaccttttttttctgccctactttctagacatgacatttttgggagcattcttaagatgtacttagggggtccaagcttctcttacgagagagaattgccctagagtggtcataagtatcatggtaaccaactgcttttttgaatctttggtgttaccaaacaaaactaaaaaaccttaggttatggcaggtaggtaaggaggtggtctgggaccagcttcctgaagaacacacacatgcctgtggacaaccatcacttcttttggtcatctttttctgctcagctctagaagactccgatggaagacaggactctccagcaggggaactgccaaaaacggtccaacagccaacaggtacagtttttaaggcagtgtttttagaaattttggtggagggaaccatggtttccctccagataaaagctgtaaagaagtgaatgtaagtatgttcaaattatgataatgaaggccttttttccctcaaaaagatagttaacatttactcttacattaagccatatttggtaactagcatcgtttcaggtgacagtgtttttttgtttttgtttttgttgttgttgtttttttgagacagtttcattctgttgcccaggctggagtgcagtggtacgatttcagctcactgcaacctccacctcctgggctcaagtgattctcctgccccagcctcccgagtagctggaattacaggcacccaccaccatgcccagctaatttttgtatttttagtagagacggggttttaccatgttggccaggctggtcttgaactcctgacctcaagcgatccacccaccttggcctcccaaagtgctgggattacagacatgagccactgtgcccggctgtttttgtttttttttttgttgttgttgttttttgtttttttaataaagatgtttactccactgaagataacagtctttttgcttcagtatgtcccaaagtaaagctctgtaccaagtgctaggaataccaagtaccttactctgctgatggctgttttataaccaaaagcgttaagcaggtttgattgcagttttctttctctttacagaatctgagccagtcaccataaatatccaagacctactttcctgttctaattttgcagtgcaacacagatatctgtttgaagaagacaatcttttacggtctacacaaaagctttcccattcaacaaaaccttcaggtaattccaagtaaaatattactataagataacttgatctcagcctttcggcttgccaacaaccttagctttaaggaggaaaggaaagaaggaagtaggaaatagtatagaggaaaagagaagaaagaatttaagtaaaatgagaactaaaacataaactaaaagaaactcaagtagtgttcctcagtaatccacagtaagggccacttccagtgttggaagcatatacagtgctttcctggtatttactggatctggctgcatggaaaaagtggaacatgtctttcattatggtttcctccatatgctgattcattcctattattatgcgtctgggaagtctggtggattctagaggtgaacactttccatctgctttctcaggaagccctttggaagaaaaacacgatcaatgcaaatgtgaaaaccttataatgttccagaaccttgcaaacgaagaagtaagaaaattaacacagcgctatatccttttcttgcattatgcttctgtatggaatgcaaagaatattatcaaaacttcacacactctatgtaggttttatcaactgaagtaaatcccacgaagtcacaaagaacagtgatctccaggaaaggctttttgctttaaaaagcagcctcacaggtgtttgagaggcaagggcaagccaagcttattagcagcagtcaagcacttagttgccatcggctgttctcgggggcttagcaataaggcctgtcagtcagcatacaaagtaaggaaaaaagagacactggcctaactccgtctctgctaggaaggtgtgtaggacatgatgaggtctgaagtgcatcaaaggtacggtaagtatagacaaagaatgttgtagaatgaagaggtttcaaactcagtactccaaacttttcctttagccccaaggaacaccacagccacatatagattcagtgtgtttagtttctggaggacaggagtggttttttcttttttttcccttggcagcagagatcttctctatcggcactctaaaaaatgaaacactccaccaagggaacagcaggatccaatgattcatttaaacaatattaaataaaaggaatgcttggggataataaagaaaagaggattcggtgcttttacatattgaacaccctgccaagtgctctaaacttaaaattacagtaagcgtactaaagctggctgatatctcaagtgcatcaactagtctatagggaaatggcttaattctgaactatctctgtgccaatgggcttatgtaataaggaacaacagcatagggcaattccatttctgaaagctggaaatacgctcccttaagtaaaatgaaataatctttctgagtggttaattgacgaatatgggctctcattctgccctcaagagggcagatagagggtactgaggagcttacagggaagaccaatacctattctaatgcccttttcttctcgcttgcctgtcccaccccaaagttctactcacaagagactaaagaagacatatttttacataggtcagaattcctcaaaaccgtggccttatgtagcatcatggtgaaaactccgtatcgccctttgcttctgacttcatatcttactttccaaggccgaattctttcattgtcttctcttcaccagattcccaacattatcaattctggctcctagaagtgtgctatggcaaactaatttgcaagcattaagggtggaagtggaatcacaattaaaaaaaaaaaaaaaaagactgcagctgggtgctgtggctcacacctgtaatcctagcactttgggaggccgaggtggccttgcttgagcttaggagttcgagatcagcctgggcaacatactgaggccttgtctcttaaaaaataataaataaaataaggccgggcacggtggctcacgtctgtaatcccagcactttgggaggccgaggcaggcagatcacctgaggtggggagttcgagaccagcctggccaacatggagaaaccccacctctactaaaaatacaaaattagctgggcgtggtggcgcatgcctgtaatcccagctactcgggaggctgaggcaggagaatcgcttgaacccaggaggcggaggttgcagtgagccaagatcgcgccattgcactccaacctgggcaacaagagcgaaactctgtctcaaaaaaagagaaaaaaaacaaaaataaataaaattaaaattaaaaagacaaattcacactgagccatctggctttgctgatgttaaaaaaaaaaaaacccaaaatatttgtcttgacagaatatgttaaatgagttctacaaatttacaagtcagggttttaacatacttgacagaaatgggaaaaaaaaccaaaaccttttagatttcagaagccaaaattttacgtggataaatcaagttatatttaaatgtaaataaaaatagacaattcttcatcttccttaatttgagatttactagaagaaatgacacagagaatggaagccctggaaaatcgcctgagatacagatgaagattagaaatcgcgacacatttgtagtcattgtatcacggattacaatgaacgcagtgcagagccccaaagctcaggctattgttaaatcaataatgttgtgaagtaaaacaatcagtactgagaaacctggtttgccacagaacaaagacaagaagtatacactaacttgtataaatttatctaggaaaaaaatccttcagaattctaagatgaatttaccaggtgagaatgaataagctatgcaaggtattttgtaatatactgtggacacaacttgcttctgcctcatcctgccttagtgtgcaatctcatttgactatacgataaagtttgcacagtcttacttctgtagaacactggccataggaaatgctgtttttttgtattggactttaccttgatatatgtatatggatgtatgcataaaatcataggacatatgtacttgtggaacaagttggattttttatacaatattaaaattcaccacttcagagaatggtattcagtgcaaaaattcttagtttaactttaaatggaagatatgtatgtatgagaaatggccaacatgcctatgaaaaaaatgctgaatctcatcagtaatcaggaaaatgcaggttaaaacaataccatttttcacccatcagcttagcaaaaatgagtatattttttaacaagtgttggtaaggatgtggaaatgtgaggttcttgtagtaagaatgcaaatggcactctttgtagagtaagtctgttgacatctcataaaactgaaaatgcacacaaccctgtaaatctagcaactgcactcagttgatttcagcccatacatacaaagagacctgcataagaatgttactaggctttgtaaaagcaaaaaataaggaacaacttaaacatcatcagaaggggaactgataaactctggtgtaatccataccacagaaatacaacaccgcatgtacaggaatgtgctacatctatacaaataaatggtcaaactcaaaacaaagatgactttaaaaagaatgacaaaatgtttagcataccattcctgaaaattaaaaaaacaaaataaaaaatgtcacggtgaaaccccgtctctactaaaaatacaaaaaattagccgggtgtggtagtgggtgcctgtagtcccagttactcaggaggttgaggcaggagaatggcatgaacccgggaggcggagcttgcagtgagccaagatcgggccactgcactccagcctggggacagagcgagactccgtctcaaaaaaaaaaatgaaaagaaaaacctagatgggtaccccactacacaccgaggctgtttgttatataccccattgctcctagactacaaacctgtacatcatgttactgaatacggtagacaactgtaaaacaatggtaagtgttgtatctaaacacagaaaaggaatttttcagccttattataatcttatgggatcactgttgtatatgcagtccatcactgaccaaacgtcattctgaggtgcatgactatcagttctggcattgctgccaaggtggctcaattctactttactctctgttgtgttcaggctccacctagcggcacaaaagtctgcctcctcctttttagcaattaaatacctttcaacctaacattttatctctctgccatgagactatgtgtgtgtgtatatatatatatatatattttagctattaaacacatttctcctgggggaagaaaaacctcatggcaaaaaaaaaaagcctccaaccaatgcattaaaatctacagattaatccaagatatttaacttgaagattgtctaaaatattatttctctattttgcttgtttttgccacttgtaaatctcagagttctgcattccattttcatcacttattggatttaatctgcaaaataaggctaataataatattgagtggtcagaggattaaatgagttaacatatacactattttgtaaggtacctaaaacttttattatttattttttgagatggagtctcgctctttcacccaggctagagtgcagtggcatgaccttggctcactgcaacctccgcctcctgggttcaagcaattctcctgcctcagcctccgactagctgggattacaggcaactgccaccatgcctggctaacttttgcatttttagtagaggaggggcttcaccatgtggccaggctggtcttgaactcctgacctcaggtgatcagtcagcctcagcctcccaaagggctggcgtgagccaacacacccgaccatattatttatttttagagacagggtcttgctctgtcatccaggctagagtgcagtggcaccacgatagctcactgtaacctcaacctcttgggttcaagcaatcctcctgcctcagccacctgagtagctggcaccataggcctgtgccaccacaatgggctaatgtttttaactttttttgtagagatggggtctcattacgttgcccaggctggtctcaaactcctggccttaagtgatcctcctgcctcagcctccagaagtgctgagattacaggcataaaccacagtgctggaccctaaaacattttaaatgctcagtattaactattatatttttagtctttagcagccaagagtattggacacaaagatggtgctgagctaagtgtatgttgagtaaatgaaaagacagaataaattctttgctgacctgagaaaagtaatctggtagattcccacccctaaactatcttttgaagcaaacaggcagtagtaaattaaataatggtaaatgcataagaaatttaagaactactattaacaaaattctgaactagaaagtcccaagtgtatcaataagagaattaagtaaatgtttaagccctagtagtcattatccactctaatttttgataagtgacacgaagttgaataccttgagtccctgtcctgtagcaccttagagagaggtaatcaatgccataaaaaaaggtactaaggtaactcagaagcacctgttttagactgggtgctaggcttaccctcagaacaagcacaggtaagcccagaaaagggaggagtgggggaaggaaaccagattccactgcaggtgaagggagcagcaagtctaaggagtagttggtagttggaagacaggggatggaaaacttttccatgacacagattataatattatcttccagacgacccaactattaatagttatattcataatcagcctaaaagttggtttcttctctacattccttttgttcctgccaccatcccataccaaccgcaattcttaacacactctacaatatccaacctcttctttgagatttctatttccatatctaagagttcagtagaggtatggtatggagtaaatccaattggctgcaatttcctacaatcccctgaatattagagctacccacacactgctttcattataatcagaaaagaacattttaaatgtcaccttacactttcccagatcttcctggccagtgtcactttctctctgacagcggtttaagagcacttaatcaaaggtaacataggccagaatgagtaaggaatgtttcctgtctactagctttaaacttcttgtctctctgaactttcttgctgaaagaaagaatcgttgtgactgcacaaaaagaacatataatgaaaaggcaaaaaccaaatgtagcatattatcaactacatagacagccctagaaatcataaattttctaaaaaaccatcattccaaaatgcctgcagccaaaaaaccacaacagaaaccatgcaaagaaagggtacaccaacatctgcaatattgtattctttaggtcaccaccccctgagaaattaaactcgagctagtcaacctggaggaaaaactaacccaaatagtgtgaaaagtcactatttgggacttgtgggaaaaactgagcaagtagataagcacgcaaactaccttaaccatgagattgaaacattttgaactatgggaacaaactaacaaacactattagagaccagtagtcagaccaagtaattcttatcaaagattcaaatattttatatcactttggccacacgggtctctggatatgtaaacatgaacaccttagaacacttaaaatctttcatatattcagtgactcttaaccaggagagaagctagtttaaaaatgtggtgacatttgggggtgattacaatgacatggaaggaaaaccaagaatgaaaaatacctgcagaatccacagccctccacaacaaagaactgtcccattacacaatgtcagtagtgctcccaaattgagaaatactgagtaaatgaactggtaaaaccattaaaaaccagactctccaaagtattaatatatccacaacctcagattaacttcggacacaaactaaaatcatgagctattcccttgaaaaaaactcctaacccccgactatcaaattgggaacatgacccacccagggctgttatatagctattaagagctggggtcctctgactccaagtgcagtaaatgcttgattttctgcatactatttagaaggcatcctcatttactgtctcactcatctaccatcaaaacttgcctgaaagaggggagggagaaaaggagcaaggagattgagtctaaaatccaaaagacattgtcttttctgacacttctgtggcctccctccctcaaagcccagctgactacatagggcataccttactagcaccattcaactctgtaaattagtatctaactaaatcattatttcccctcaaattaattctttcgaatgttccaaaagatattaacatatgaaggattccctgggacatactcttgggggatgcagtatagtttccaaaaatgtgaatacttaacgtacttcacagtacatcttttaggtgtatgatataaaacatactcgggcaaacatggacttaactattgatgatctgggattactcagaaatcgtccaagtgcaccaaccacttaacttaggaaagattattcattaaagtaaaacttttcttaacctatgacagcattttggatggggaaacatttcagttaatcttttttagctactcaaatttggtaaattgcaattctgggtatttaaccttgttacctcctaagcatactagaatataaaatgcaaacaatgtcctgagaatggaattacaaaacttgagctttctaaacatctagtactagaaaggaacccagtgcagtccctttacaaaaactgggccaggagcagtggctcacgcctgtaatcccagcactttcagaggctgaggccgggggatcacgaggtcaggagatcgtgaccatcctggccaacatggtgaaactccgtctctactaaaaatacaaaaaaaaaaaaaaaaattagccaggcgtggtggtgcgcacctgtagtccctgttactcaggagactgaggcaggagaatcgcttgaacctgggaggcggaggctacagtgagccaagattgcaccactgcactccaagctgggcgacagagcaagactgtctccaaaaaaaaagaacaacaacaaaaaaaccctggaaaacagaaatcaggatgtgtaactttttttttttttttttgagatggagtcttgctctgtcgcccaggctggagtgcagtggcacgatctcggctcattgcaagctctgtagctgggactgcaggaacccgccaccacgcccggctaattttttttgtacttttagtagagatggggtttcactgcgttagccaggatggtctcgatcttccgacctcatgatccgcccgcctcggcctcccaaagggctggaattacaggcgtgagccaccacgcccggcccaggatgtgtaactctttactgaaaagtcttgccaccacatctgcctcatcctctctaatccaaccttcaggaaattgtattgaaacaaaaatagagaaaaatactgaaatagatacaatgtttttaaaacaagcaaattttattaaaggaaaattttgcaggtttaaggtttgcaggtgaaattttgtaggtgaaaaggtttacttttcaccagtctgttctggcatgcttctaatgatgtcagagtcacctaaaaaataaaaataaaaaaacagtaattttacaattcatttaatagcaactggtaccataaaatttctctacctttggttatcccttctgtagacaatggtctgcaaattagcactgactttttgcaaaagttatcacattagctgtactgtcatttttcttaaggttgaccaaagataacctagaatcacagccattatataatcacataaaatgatcatataataaaattggtttatcaccagcatttataaaaccagacctagggaaagaactaggtttggggacacatgcatggtcttaatatagcgaatgtttagcctgtcctgactattacaaaatcagaacagcgagaatattcgcagtattctatgaatcaaagattcacaattggaaaacagaatgatgtagattttttggcacttttttttttctcaagctaattttacatgtctgttctcaagaagcaagaattactttcttctgttttgccagattattctctccttataatttcaccttttaccaaatctatgtcattatttcataggtacttcatcaaatgaaattcattatctgacagtaaaaattttaacttataataaagccaattataatgtattggcattcattaccaattctctacaaaatacaactacacgatatgccttgctagatccatattctatctgaatttaggaaccaaagacatttgtgtagtaagaaatacttgtccagacattacattagaaaggcaaaaaaaaaaaaaaaagactttatgatttaaaaagcatacctggatcaatgatagccagtgtgcacactctgtagtattttccgcatgctgtgcccagttcaatattattgccactgtagtgatggacaccagttttagccaacatagcatagtactctatttcagatttcctttgggaaccaaaatgggcaaataaataaatgcgataccaagtgactgacagactaaatgttactacttcttttactagtgttaatgttgttaaggccttcaaaaagtaacaaaatcacatattactcttaaaaacatcatattcattatccaatacaaaccaacatttgtatgtatcccttgcaagtgaaggggcaaccagcaaatatctaatcaacccctactatgtttaagacagtatcaatactcacggaagagggtaagatgcaaataaaagaaagcaaagcattatctagcattagtaaggaccacatactttatatttccatgacaatctctaaagtaggtattatgtacttttttttttgagatggaatctcattctgtcgctcaggcggatcgtgcagtggcacgatctcagctcactgcaacttccacctcccgagttcaagtgattctcctgcctcagcctctcaagtagctgggattacaggcgtgcaccaccacacccagctaattttttatatttttggtagatggggtttcaccatgttggccaggctggtctcgaactcctgacctcaagggatccgcccgcctcagcctcccaaagtgctgggattacaggtgtgagccacggcacacagccctattctttttttttttttttttaatctaatgaaactgagccacagaatagtaagtggaggatccagaatctaaacctttaaaagataagccatttctatcaccatcccctcagtgcccagaattccagatgggaagtgataccgttttagagttaaaatttctggcctcacgcgtgtaatcccagcactttgggaggccggatcacttgaagtcaggagcgtcagaccagcctggccaacatggtgaaaccttgtctctactaaaaatacaaaatttcagcgtcaatttagtagatactaatggttttaggaatcggaaaggagtcctatactatcttgccactcaattatgtgaatccacataccagcaatagtgctacaatgtattagttaaaaaagcacctcaagccgggcacggtagctcacacctgtaatctcagcagtttgggaggccgaggtgggtggatcacctaaggtcaggagtccgagaccagcctggccagcatggcgaaaccccatctctactaaaaatacaaaaattagccaggcatggtggcaggtgcctgtaatcccatctactcgggagggtgaggcagaattgcttgaacctgggaggcagaggttgcagtgagcttagattgtgccattgcactccagccggggtgacaagagcaaaactctgtcttaaaaaaaataaaataataaatggcacctcgggccccatcccagatccaatgaaatcagaacttgcattttaacatcacccatgtgactcctttgcacagtcatgtttcagaagcactactatagaagacaggctttaaagaaagtttcaaagaatggttagggaaaagccgaacccatgggacaagacagaaagggccctccaggctttgacggtaactacagacaccctatataaaatgctgtaagcagcttatgcatcaccacagaaaatttgctcacatagcttatactctgcaaggtccaagtttgtttggcttatttacaacaccccctaagttcaatttcaaaacagtgagtcaagcataaatcttgactcagaactgatttagcgggctaaactaggtgattctatgatagcctgcaactccatagcccagcctcaacttttcttacctagttttttgacactaaaacaagttcacacaatgaagcatcattaaagcacctcaaagctaaaagaaccaaaaaagcaggacacaaaatacatggaaaaaacagtaatgtgtctgtgtttccattaaacctcgatgttctgttttcactcctgccacacacacacatttctcctccaaaaataagctcacagaaggggagcacacgatttgggggtgggtcggggagacgggaatgaagggccaaacaccacaatcgctaccgtaattatcctgcaagtgttcgagttcatggtactcagattacaagtttacactcctgtatattcgttcacgatgaattcgcggtaggcgaagcacgttcagtctcttcgattacctcaaagctgggcagttgttagcgagaatgaccaatttcgctttgccttgtctgatcatcttcagagtctgcttgtaccccaggacgtacttcccacttttcataacgagttggagcctagagttgatcgactccagcgactttttctacaaagcaaacattaaatacggacctaagggcctcgcctgcaaccgcctcaaaaccggacccagctttttgaagccgagccccttaaacttccgaagtcgaggaccccaagtcattgagagggccactgggattccttctggggccctccaaatgccagcaggcatgctgtcacccccgtgggctcacatctgcccgccctggccaaaacatctctccacgtgaatcgtcttccgggcctggcccgcctcactcaccgtcttctttgcggccaccatcttcctgccttaggagcgggacggcccccaacctagaagagacagagaacaggacaggaattttaggatccggagttacaaatggcaacccgcaaagctccccgcgctgcctaaacctcggtcggtaggagcccactcaccaacagcagccgctaagatggccggggaacgagaaaggaaagacttcccacaatgcaaagctcttcacggcagagccggaactgcgggaccggaagcggaaacagatcgcaagcagaaggggcggagcaaaagcggagggcagctgccggttgctattggtaccgctagctagaatggctgcgggggccgtacgcggctgctcatacctttaatcccagcactttcggaggttgaggcgggaagatctgttgcgtccagctcaaggccagcctggacaacatagaccacccctgtctctacaaaaaaataaaaaagaaataaaaaagaaattagccgggcgtggtggcgcgctccagtagtcctagctactcccagctacgccggaggctgaggcggagaggtcgcttgagctcggtaggtcgaggctgcagtgagccatgatcgcgccactgcactcagcctgggcgacagagtgagactctgtctcaaagaaggaaaaaaaagaatgacggcgggggtgttcttttccccctctgcgggcctttaagcttcgcggcgttgtgttgctgttctgctgcgagctgcggtctaactaatcgaggcgcttagaacccggagggagttcgaaaagccgactgaaggtgaggtgggagggtcgatgagaagaggctgcggcggctgcgaccacggtctcaatgccgctgaattcatctttgtcctgaggcgcggctcttggagagccttgtgggtgactccgatgcgccgcagcacccgcatttactctccgcttggtagaagcagctgtgtcctcacccctgcggtcacccaagttacctgtcccctggagaacggtggcgccctgctcgagtttcccaaaactcgccttttgtgactgtgttagcgtgaacttgtgagccgagtttgcactgagagcgcgataaacaggtctaattttttaaaagtatttttgctgttaacg

SEQ ID NO: 1166 - DNA, 4515 bp, Homo sapiens
tgagtcaccacacctggacttttttaactttttaaataaatttaaattttttttttgtagaaacgaggccttgctgtgtggaccaggctggtttcaaacttctggcatcaagcaatccttctatctaggcctcctaaagcactaggattgcagacatgagccatggcacctagacttgaccctgggtttgaattctggctctgacacttgctaactgtgtgtgaccttgggcaggccactgacccttcctgagccttatgggaatgtgggaataatattaggtaatggagcaagttaatataggtaaagaatttagaatagggcctggcacatggcctcagtctagtaccagagtccaagcccataaccactgtgccaacactcttgtaataaatgtatgtgggagacagggaggctgggaggctggatatgtgatgctactttatgtcaactacacatgaattttatatgtataatttatataaactaattgatgccatctactattattagactgaacaaatattgttacttggaactctcagatatgtaatagcttttttttattcaaatccaaaatgtaaaatgtgactatgagtaattgataatgaacttaactgataagaaacttcaggatagatttttctcaagttttccattcagtcttacagtgattaaagtgatgaaaaattccaactatgcatgccctgctcggagcgtccaagaagagcctaccaacgggggctacttaagctctcaaaggccaaacacacaaacggcattttgagtgcaagtggtctgtttgaactctgaaaaggcggggcagcgggcctgcagctcctggagttcagggagacccggaaatctcaccctgccctcttcttgtgttgtgtttgtcacagccttgcccctcttgctcgccttgaaaatggaaaagatgctcgcaggctgctttctgctgatcctcggacagatcgtcctcctccctgccgaggccagggagcggtcacgtgggaggtccatctctaggggcagacacgctcggacccacccgcagacggcccttctggagagttcctgtgagaacaagcgggcagacctggttttcatcattgacagctctcgcagtgtcaacacccatgactatgcaaaggtcaaggagttcatcgtggacatcttgcaattcttggacattggtcctgatgtcacccgagtgggcctgctccaatatggcagcactgtcaagaatgagttctccctcaagaccttcaagaggaagtccgaggtggagcgtgctgtcaagaggatgcggcatctgtccacgggcaccatgaccgggctggccatccagtatgccctgaacatcgcattctcagaagcagagggggcccggcccctgagggagaatgtgccacgggtcataatgatcgtgacagatgggagacctcaggactccgtggccgaggtggctgctaaggcacgggacacgggcatcctaatctttgccattggtgtgggccaggtagacttcaacaccttgaagtccattgggagtgagccccatgaggaccatgtcttccttgtggccaatttcagccagattgagacgctgacctccgtgttccagaagaagttgtgcacggcccacatgtgcagcaccctggagcataactgtgcccacttctgcatcaacatccctggctcatacgtctgcaggtgcaaacaaggctacattctcaactcggatcagacgacttgcagaatccaggatctgtgtgccatggaggaccacaactgtgagcagctctgtgtgaatgtgccgggctccttcgtctgccagtgctacagtggctacgccctggctgaggatgggaagaggtgtgtggctgtggactactgtgcctcagaaaaccacggatgtgaacatgagtgtgtaaatgctgatggctcctacctttgccagtgccatgaaggatttgctcttaacccagataagaaaacgtgcacaaagatagactactgtgcctcatctaatcacggatgtcagcacgagtgtgttaacacagatgattcctattcctgccactgcctgaaaggctttaccctgaatccagataagaaaacctgcagaaggatcaactactgtgcactgaacaaaccgggctgtgagcatgagtgcgtcaacatggaggagagctactactgccgctgccaccgtggctacactctggaccccaatggcaaaacctgcagccgagtggaccactgtgcacagcaggaccatggctgtgagcagctgtgtctgaacacggaggattccttcgtctgccagtgctcagaaggcttcctcatcaacgaggacctcaagacctgctcccgggtggattactgcctgctgagtgaccatggttgtgaatactcctgtgtcaacatggacagatcctttgcctgtcagtgtcctgagggacacgtgctccgcagcgatgggaagacgtgtgcaaaattggactcttgtgctctgggggaccacggttgtgaacattcgtgtgtaagcagtgaagattcgtttgtgtgccagtgctttgaaggttatatactccgtgaagatggaaaaacctgcagaaggaaagatgtctgccaagctatagaccatggctgtgaacacatttgtgtgaacagtgacgactcatacacgtgcgagtgcttggagggattccggctcgctgaggatgggaaacgctgccgaaggaaggatgtctgcaaatcaacccaccatggctgcgaacacatttgtgttaataatgggaattcctacatctgcaaatgctcagagggatttgttctagctgaggacggaagacggtgcaagaaatgcactgaaggcccaattgacctggtctttgtgatcgatggatccaagagtcttggagaagagaattttgaggtcgtgaagcagtttgtcactggaattatagattccttgacaatttcccccaaagccgctcgagtggggctgctccagtattccacacaggtccacacagagttcactctgagaaacttcaactcagccaaagacatgaaaaaagccgtggcccacatgaaatacatgggaaagggctctatgactgggctggccctgaaacacatgtttgagagaagttttacccaaggagaaggggccaggcccctttccacaagggtgcccagagcagccattgtgttcaccgacggacgggctcaggatgacgtctccgagtgggccagtaaagccaaggccaatggtatcactatgtatgctgttggggtaggaaaagccattgaggaggaactacaagagattgcctctgagcccacaaacaagcatctcttctatgccgaagacttcagcacaatggatgagataagtgaaaaactcaagaaaggcatctgtgaagctctagaagactccgatggaagacaggactctccagcaggggaactgccaaaaacggtccaacagccaacagtgcaacacagatatctgtttgaagaagacaatcttttacggtctacacaaaagctttcccattcaacaaaaccttcaggaagccctttggaagaaaaacacgatcaatgcaaatgtgaaaaccttataatgttccagaaccttgcaaacgaagaagtaagaaaattaacacagcgctataagaaatgacacagagaatggaagccctggaaaatcgcctgagatacagatgaagattagaaatcgcgacacatttgtagtcattgtatcacggattacaatgaacgcagtgcagagccccaaagctcaggctattgttaaatcaataatgttgtgaagtaaaacaatcagtactgagaaacctggtttgccacagaacaaagacaagaagtatacactaacttgtataaatttatctaggaaaaaaatccttcagaattctaagatgaatttaccaggtgagaatgaataagctatgcaaggtattttgtaatatactgtggacacaacttgcttctgcctcatcctgccttagtgtgcaatctcatttgactatacgataaagtttgcacagtcttacttctgtagaacactggccataggaaatgctgtttttttgtattggactttaccttgatatatgtatatggatgtatgcataaaatcataggacatatgtacttgtggaacaagttggattttttatacaatattaaaattcaccacttcagagaatggtattcagtgcaaaaattcttagtttaactttaaatggaagatatgtatgtatgagaaatggccaacatgcctatgaaaaaaatgctgaatctcatcagtaatcaggaaaatgcaggttaaaacaataccatttttcacccatcagcttagcaaaaatgagtatattttttaacaagtgttggtaaggatgtggaaatgtgaggttcttgtagtaagaatgcaaatggcactctttgtagagtaagtctgttgacatctcataaaactga

SEQ ID NO: 1167 - protein, 922 aa, Homo sapiens [sequence omitted]

SEQ ID NO: 1168 - DNA, 339234 bp, Mus musculus
  misc_feature (1)...(339234): n = A,T,C or G
acactcgttgatcagtgtcttgctcagccatcattaggaaagttacctcctgcagcagatggaaacaaatacagagacccacagctgaacaatgtgcagagagtgagagaccttgaaacagtcttaaatggatgtctccatcaaatccctcccctcaggtccctgaaaattttgaagaagaggaggtagaaagattttaagagccaatgggggtggaagactccaaggaagcaggcctcctggatatgacaatcatggcctcactgagactgtggcagcacacacagaacctcatggatctgaccagtgctgagaaggaaagtgcacacaagtctccatttctaagtcagaagctaccttcagttgatacctgctcacaaaggaaaattagttttctacgtggagtctcagagggaagccaaactactcttaaggccaggctttatgcctgcagtagatggtcaacacaaatcgaattcaatggcgtttttagaggttttcacatatgttattattccaaaataatcattcttctatcagccagctctcttcagatctgacagaactattggtagccattttaaagaacccagctggaaacatacaagctcagcctagacagaagaacctcaattatgagattcctgggcaataataaatgattaccattttcaactactgggcctggagttagcttattaccctgtaataaattacactggtggacagattgaacatttcctgagacatcatctactaacgttctattagtgtttgatcagaaaccactaccatttgactgaccttgatggagcaagtcaatcctttctctgaatcttaagacacttggaccgaggtagcacaattcaattcctaagttctatagttagaatttgagatgcttctgaagggctacatattatgtgtgtagtctccagccatggcactactgggagacagtagaaaattctagagtagagcctagaaagagaccagatgtcatgattaaagggatgctttcaatgggcttgataattcccagccacaagaaggtgagcagtttgctctatcatgtatcctccagccaaaaaagcactgtctcgctacctgaaaccaacaaagacaactgtctatggactgaaacctggatcattgtgagccaaaatcatcttctctttctcattaattttatcatcttagatatgtgttacagcaacagaaaagatgactaccacactggacaaacacagcagaggcttatttctcacaattctggatgatgagacatccaagattaaggcaaaagtagatccattgtaaaagttctgcgtcttacaaaaaatggaacagagactgaaggaaaggccatctagagaccaccccacctaggggtccatctcatcttcagacacaaactctgatactattgttgatgccaagaagcgcttgctgataagagcatagtatggctgttccctgagaggttctaccagcaccttaccaatacagatatagatactcacagccaaccaccacactgagcccggagccccaatggaaaaagctagaggaaagactgaaggagttgaagggaattgcaaccccatacgaagaacaatatcaactaactggacaacccagagctcccagggattaaactgccaaccaatgagtacatatggagggatccagggatccagacacatatgtagcagaggatggacctgtctgacatcagtgggaggggatacccttgatcctgtggaggtttgatgccgcatcatagggagggagatgctagagaggtgaggctggagtggatgagtgggtagaggagcacccttatagagacaaatgggaggggtaagaagaggcatggggactctgtgcgccttctcctctcgaagtgctcctcttctacaactgttccgcggcggctgccgccatgagggagatcatgcacctgcaggctgggcactgcggcaaccagattggcgccaagttctgggaggtaatcagcgacaagcatggcattgatcccactggcacttaccacggagatagcgacctccagctggagcgcatcaacgtgtactacaacgaagccaccagtggaaagtatgtgccccgtgccgtgcttctggacttggagccgggaaccatggactctgtgcgttcagggcccttcgggcagatcttcagacctgataacttcttctttggtcagagtggggctgggaacaactgggccaagaggcactacacagaaggtgcagagctggttgactcgatgttggacattgtgagaaaggaagctgagagctgtgactgcctacagggcttccagctgaaccactccatgggtggggggactgggtctgggatgggtaccctccttatcagcaagatctgggaggagtacccagacagaatcatgaacaccttcagtgtggtaccttcccccaaggtgtcggacacagtggttgagccctacaatgccagcctttcagtccaccagctggttgaaaacacagatgagacctcttgtattgataatgaagcactctaggacatctgcttcaaaaccttaaagctgaccacacccacttatggttacctgaatcatctagtgtctgccaccatgagtggggtaaccacttgcctgcgattccctggccagctaaatgctgacctgcggaaactggctggtaaatatggtgcccttccctcgcctgcacttcttcatgcctggctttgcccccttgaccagccggggaagccagcagtaccgtgccctgacagttcctgagctcacccagcagatgtttgatgccaagaacatgatggctgcctgtgatccaagacatgggcgctacttgactgtggctgccgtgttcaggggccgcatgtctatggaggaggtggacgaacagatgctttgaacagaacgtccaaaacaagaacagcagctactttgttgagtggatccccaacaatgtgaagacagctgtctgtgacattccacctcggggcctaaaaatgtctgccaccttcattggcaacagcaccgctattcaggagctgttcaaacgcatctcagagcagttcacagccatgttccaacgcaaggccttcctacactggtacaaaggtgagggcatggatgagatggagttcactgaggctgagagcaacatgaacgacctggtgtctgagtaccagcagtaccaggacgctacagcggaggaagagggagaatttgaggaggaggctgaggaggaggaggtggcttagagctgtcttagtcactaaagcatgggagcagtgtgaactctttattcattcacagcctgtctgctagccatgtccactgtgcatttgctgtccggtgatctgacatcacttgtacagataccaccattaaagcaatttatagtgggggaaaaaaaaaaaaaaagaagaggtattgggatggggggggggagggnnnnnnnnnnnnnnnnnnnnnnnnnnnnnnnnnnnnnnnnnnnnnnnnnnnnnnnnnnnntgtagatgaataaaattattaattaaaaggaagtactgcatctttataggttactgctttcttgctgtatctccacatgatggaaaggccaagggtctccttacaggcttcttttataagagtattaatgtttggaggctgattatgggatggatcccctggtgtggcagtctccagatggtccatcctttcgtctcagctccaaactttgtctctgtaactccttccatgggtgttttgttcccaattctaagaagaggtaaagtgaccacactttggtcttcgttcttcttgagtttcatgtgttttgcaaacgcagacactgtcgcatacaccagcaagactttgctgaaaggaccctgatatagctgtctcttgtgagactatgccggtgcctggcaaatacagaaatggatgctcacagtcagctattggatggatcacagggcccccaatggaggagctagagaaagtacccaaggggctaaaggggtctgcaaccctataggtggaacaacattatgaactaaccagtacccccagagctcctgtttctagctgcatatgtagcagaagatggcctagtcagccatcattgggaagagaggccccttggtcttgcaaactttatatgcctcagtacaggggaacaccagggccaagaagtgggagtgggtgggtaggggagtgggggggggcatgggggacttttgagatagcatttgaaatgtaagtgaagaaaatacctaattaaaaaacgattattaaaatgctataaaaagaagagtactaatgttgttcaggagggctccactattatgaacagataattgctcaaaggtacatctctttgagctacaaggatgctcctctacacgattagaatttcaatatgagtgtatcagggtcacacattttctgactgtcattttctgctttggcaagtagcaggctcctgaactattcagcatccccagggctggcgtgatgtcactataacagaagcaattcaacactgtccacgctggagacaggattgccataaagaggtcttgcaggcagttagtgaaataaagcctttgaaacataatgggcttaggaaatttcgccatggctatctgaaacttttaaatgtatggtgatgttttaattaagagtaaaacagatgtaggccaggtgtggtggcacacacctttaattccagcactgacaggtgaatctgtgagttccaggccacatatgactacatagtgagatgacctgtcttagagaacaatatctccaacataagggaggggatgtgtgataaaacacacccatatagaaaaagaaaacaatacataggttttggataacacttgaagtgatttaaaacatgtatagagttataaatttttattatttttcacttgaaaaggccttggaaacataaaagtttatatttggaacaggtaaaaatgatcttggggtaacataatttgatagcaagaatgttctcaaatattggaaaaaataggttattctggactcagtgatggagatcagagtctagttaaattttctaactctgtgttgatgccttaactgaatcctcagctgagagaggctatttgcccagttttgtgtctcataattctcattctctattaggcagttttcaccatgaacaatacttggcaatctctctagaaatggaatcttgactttatgaggatcattggtcaagcgaaacaagttttgaatgaaaatccaatgacccctaagggactttcagtgtaaatagtcacaattttgtggacatgagcctgcctaatatataagcagattaatcacttatgatgttccaacattgaattaccactgaaattattttgtaggcagaacgagttgcttaagaatgttcaggaatcccaacaaaggtcaataaaagtttacttttatcctttaagaatagtaagagactaaatagtattgtgttctaattttcataatgaaaattaattttgacgtaggaacaagaaagtgcataccatgacatttcagactagggacaatcttgccttgatgcactgccctgctcacaatccctactctgggaggctttttaaagtgagaataatttgtcctgtgatttttatcagtgaagtaatataatttcctcagctagaaggaaaaatatgggcctcctattttttcacatatattgagactcccagtctatatttgcaattcaaaattgtatgcccttgatgatttgacctctacaggacttctttcaagaaatatttgaaaactattttatgaagaagaagaagattgcttcattttactgtgaaatactggaaatgagaagacacagatccaggcttcaggaagcttgcagtcaaccagacagacaggcttggaaatgtgttaaagggccacagattgtcactgaagcagcgcgcactgtacaccaggctgtacaaggtgggggagggtgtatgtcaagggagctggcaggaagggcatcacggtaaccgtgacacctaaataatccttgactgatgggcagaatttcacatttcagctagaggcagcagtgtgagggaacattagacatactcttcttacggttccaagtcaatgaattggattgtgccgactgtcaatcaagcagaacacgtaagagttgattgagatacagtttagtatctcgaattctaggaaaaactattttaattggcaggaaacaagaaacctcatgttttgtcaacagagacatgtgccctttccccttggttgatgctttcagcaaacatttttattaataagatggtaagtttaaaactttacaaataagttaagtgtgatgcccttccaggaactaagatcatggagtgattggggcatgtaattatttagattgacaaaaaaaaattggttttattttatctactaaaaatttaagttcttgtcatgtggttcttcttggaagtctcttaggctttcatctctgtttgctcatggcgcttcgcatattctcttcatgttataaattacccatgtgagtgtgtgttcctgccaaatgtcaacacccagagttagggctacgtcaaactcatctctgtattcagaagccatttgaagtagacgttaaatgattagatggtttgattaacagctgcttcctagggaattcactagacacaatttaaatggattatgccacatagtggtttatatctctaatgctcttattggattaaagaaaaaagtactaacaaggccaatttcttgactcccttaagaccatagtttcattaacagacccaaggcagagcaacacatactgttaatgtttttgttatagaagggttacatgcgcactatagaaacctcatatgttacagataagcaaaggaaagaaaacccctataatcctaacccagaaataaccagagttactgttttagaggaatttacaatgcgattggcacccactccaccctgcctttttcttcattttcaatgtacaagactaagttgccctttagcaagactgagctattatatacgtctctcattgttgagaagcctctttgcctctgccaacatcacacacaaaaactaatatttaatcctgccaaaataggtgaagaaaaaaattaataaatgcatatttcttcaaattctaattaagttaaacacttcattatgagtttgtggaatacttctatttccgggtaatttttctctctgtttatttgttacctcgtggctctttttttctaccagggcatgccactctgttactatgaaattgttctggagaacttaacacatgttaccaagctgtccccatgactaggccagtcacttgtcttttatcatatttccgctcggtgtcactgatcccagggagagggactaagaaaccaagagaaagatgcagctgtgatcccatcctgcagtcacttgtaaactgagtacacgtcatgaattagagtcttccaggaaaggaagcaaagagagaggcgagccttagaatatcaatttctgtgggatgagaacttttcagaaacagtggcaaaacagaccttaaaattagtagatttccctagccggctttgaactaatttaggactaatacgaataaggacagcacactgtaatactggcccagaaaagatataatgaaagtgcatttgagcaatggcaagtcaggtttggtaattacagtcaacagtaaggtcttttcaacactgtggatgcattgagccatttccacggggcatgcatgagagtcatgtatggctgtgccctgaaaactcaataaagaatgaacactcttatggtttggtaactaagaaattagctgggggcaatgctgaaattctttcttcttggggaaaaaaagcgggggtgggggcgtggggagaactatgaaggacaaaagtaaaagaagcagcaaagctgagagcccagaaaagagcagaaactgaagagagtgggaagcgaagtttaaaagagacacagtaactctcaactactttcccctcagaagtagcttcagaatccaggggatcatttatagttgtatttgatgtagataaataaaaggtgcgtggtttcatggtcttgctacctgaagtcactttaaaattcaacaaaaagtatttgataaaacctcaaacctatgggcataataggttgggatcataaaagcagtctaggttcaaatcgtttctggaaaaaaaggaagaaaggaaaggaaaaaagaaggacagatggatggatagatggaaggaaggaaaggagaaaggaaggaaggaaggaaggaaggaaggaaggaaggaaggaaggaaggaagggggctgtcttcacaggcgtgtttagaacacagagcatagctgataacagttttaaacctgattcattcctttctcaaggtatccaaaaatttgtctcttcagtgttataagtagcaaaggagaattgtgacaaagaaacaaaaatgtgcttagctacttcatgagcaatttaaaggttgagaaattattgaaacagtggagtaaaattcatcggcttgacctacagtttcaaagtttatttttaaagagtattaatctgatgcaaatagctaaattgaatagtctggacaataaatcctgggcataaaatgcatatataaaaatataactgacaaacgaggaaacaaattcaattaggatacttgagcaaatggaaaggttcaccagatgcctagggaaggcttaggaatcctgtctttaaatgggcaactgagccgctggactcacgtgatgccttttcctttggcctctttccacagtcaaccaaaaattcgtgaaggaaagcacatgaggagggagacacattgtatggcttgaaattctgacagaaacgtggttcatggcagtttgtgaattctcacacttcagtgttctgttttctttgggaataggcaggttacaaacccactggttgatgctgtaatggtcttcctccaaagaggtgaaaatgagctatttaaaaatttgttctgagcattttaaaatctttgccactgtggtcttgtcgtctttggactgggaatctcactaagtgagacttatgtctttgaggtaacactctaaggtaatgatttccattcttatggattaataatacatattttctctccaactgcggcaacacacaactaaaagaagttaagcattgtttaacctgtgggttaatcttacaaattctagtgtttttaaaaaaatcacacactatatgtatataaatatatgtgtatgtttactatgaatgaatataaatctgaatatagacacataatactatatatatgtatgtatatacttactgtaggtgtatatgtactgctatacccaccccctccacatattgaaagagatctcgaagacttacaagacagatatttataacaccagactattgaagcataatatatttaacagtcacaacatacctttatggatgtagacacaaacctacatagagaacgatgattagaatgcaagctgacttgattaactttagataaactcaagaaatagaagtgcaaaataaaacatacacgatacccttttttatttttagctcgactgttaaaaagccaattatctacctgtgaatgtataccacgcactgcaccgcaccgtactttgaggacacttcatagtcagaagtgagaaagcgtctgcccccaactgtcattgccgctatgaaattgctattaaaacagaaacctgaaagacttagtacccagctctgtgtgatcaaggaaaacctgggcatgagttggctgaggactgtcttgctgagtcctccgtgctcaccgagtgggagggtcacactgaagggacgaataagggcagagatgcgtcccgcttccactcgctgggagctggagcgggccactccgcggcggtgcggcagccctgtccggactccaccgcgcctcccaggggctctgacaccaacccaaggtaagctgcgcagctctgccacattttgcttgatgttgccttcacaagcccggtctctgccatatgctgtatttctggtcatttgcctgcatctgcttttaaagaaaatgtcacaaccgtactgcacaagtgcacatatttcgaggggaaaatctgcccacctgcattcccacgcggagacgaggggaccgagtgcatttggccagatcaggccactttgacacgctgcctataatgtggctcgtgtttgtgcgtccaggtcacgcgggctcgcgcgttccactttagttctcggtggattttctggttgggtttgggaagcagaagtgtatgcgatgctgatgcggatggaaggcacgcgagctatggaagaaggggtaaacgaacagagcaagctacgaatgctgtggggctgtggtctctagggttggatgctgtaaccgggagaggtgaaagccaggacgcaaagctcggacgctcgtgtacccggtggagttacccacttcgacccgcgcgggggtcccaagcccggcttaggctgtcgcggaggaggatccgggtctggtcccggagtacctggccctgtgtctccttcaacacgcagagtgcgcagcgcgtccagccggagcgcagccgctgtccccgctgtcctcgcagccgcggccgccgcggggacgtcagggtcccggcgcaaagggccggcgcctcgcctccgcccgcggccctcggctctgcgggaatccggccggcgccgcagccaccgccgcctggaggagggaggcggcgcgcatggtcctggagaagtttgttggcccggaaccaagcgcgccactgcacaagccagctcctttgaagcaggcgggagatgaagcttaaccttaccccagctaggtcgtggagggctctggaactagttgagtgggtgggcaggttacccacgtgggccccgtgccatgggggacagaggggaacgcatggtgggtctcggaggacaatggactcggcaatggagagaatgggacccagatgctgaaaatatatacttttaatagaaccatccaggaattgcgacagtgggtgatgtgagatctagagtgagtgagctgggagatggaagggtaacagaaataaattgtgcagcctccacccaccccatcaccaattcagactacttacttccaacctctccttggagaggaggtctgaggagcaaaagggatgagagagtactagaggcgctttagaagaatatacatctgcccacccccactcccactaatcagagctaaggaaagcaacactcctgtacaaatcaaggactacagttgttctttaagggaggaagaagcctggccgagaagggtggcctttaggttctcctgagtaggtgagcaaagcccgttgggctctttctaagtagaaagctcttcaccaggcgcctgcaaaggaggtaccgggatatcgccgtgttttcatggtgcaaattgtaagttctcaggcctgagatgaatggatgggattttctgatagggataattcttcagggtggaaagaggtagccgctaggaataggaaactcattctctggagggtttgaccagaatgatttccctaagtgttaagaaaactaagtaaggtgtcccagaaaaaaaaaaaaaagttccaacagtagaataggacaggagagccgctgcatatggacaggtacagaatagccaaaggaagggaaggaagccacgtgcaattatatttgcatctgaatttttgttatctccaagttctttccaaacagacgaaagcccatagtgctcatcagaaatgaaacctttccatctatttttctggtcctgcattttaatctcccttgctgaaatttctgttcattttctgaggcagcagaaacaggctgcgtcctgaatggctctagagacagaaggaaatatggatagaaactataggaatgggactacgtggaggttcaaacgaaggatgagcaacaagcagggataaaaggtcgtggagctgtagataacctactatgcagcccggaagtaaaacggtgtcgtggaagaccgagtgaaggggatgcgttgagttactccaggcaggccttcttgagaacttgtgcctcaaagaggcagaggataagcaggtttaacagaggagagcacgaagggaagacagaaggagaggcacgtgacagcttaaaggtgtcgagggatgagcgatgcggggtaagactgaaagcacaagttaggtgaagtctaagatgaagagagctgatgatacctgcagagaagagactgagaggggagggtgagaagcagagggtgctgtatgctgttgtatggaccaatagtaagacaaccaggtgaggaagccatatactgaatctaagggcaagatggtgagaataggcatattctattcaccctgtagaatgtgaacggaaaacacctcttaagaatgttctatcagaaagccaagagccattcagataaaaaatacactgaaaaagacgggtgaattgggaaaatatacaaagctatcaatatgaaattctaaatggcattgtatcttaggccgggatttgcctatggaaaacagaaccagagcttgtaatcagagagtagtggagggcggctggagttgttgatatttagggtatctgaacagctagtgcttacagctgtcattcagagaggtacgtcaataaagcagacacacagtcaagaatagagaaaactgcttaggtatgtccaaatagaattttccggttgacgtcttcagggaagtgaacactatttttgaaatgaaaggagaatatctatgggaccttgaagtatttgggcaaattcttcagtagtacaaatgttagcagtcaaggagtatgctttctgtcggggcaaagatcaacttcaacactattactattttggaatctcattaaatcacattcaccaagccttctagcgattttttttctctacttccctacaatttcttatttcatatgtatcctcctacaaatattaagcagtctgagtctcactgtattgactaatagatcttaatatttgtttcactttcatctaaaaaaattgcccaagactgcattccttcttccaactggttgcatagctacctacaggaggtaggtttcccggagactaaggaataaaaggtaacagtttatgtttctttaagaggataagtagagtggagacaatgtaagaaagcgattactgcttagtacagactgcaaagacgagtagtggagctcagtcagcctgcaaggcagcggatagtgaactgcttgagatggcattcacagaatacacaaaagtggcttttgaactgagagttgaaggcacagtaagagtgcccagatggtgataaaattggagagatggtccagcaataaataaataagtacataagtagataatgtatgtatgtttagaaagcacaatcaaggctacagttgcagtttagaggtagagaatattcttactatgtacaaagcccttattttgactcccagaacatgcactacccatcctaacccccaaatcgaggcagaagaatggcatttggggggtaatgttaatagtttgatggaaaagtttggaaagcagtagataagcagagagctggagagataagacttcactgtactagagccttatgtcccttgcttccagcatacaatgaaatgccactgagcatctacaggagagccctcacatgatcgggctggttttagaaacacaatattagccaggacttctcacacttacctgtaacctggcactcacactgggaggcgaggctaacactagtttgaaggagtccctggatacctagcaaagccttgacaggagagagagaggaagagggggatgaattttcagcagctgggagatggaaattggggaagggagagtggaggataggagtctagttagaaggctgttgtaactttcaggactagaaatggcctcgaagtaaacaaactcttttcatagtgaaagtgtacacattttcaaagggcatgttttggaaacagatttgacagacttccctccaggactgaggtgtatgagatcggggtgagggtgaggggtggggtggggagtacgggtaagggtggagaaggaactaaagatgattcggaacttcttatgttcctactttgagaatatttacagcaaaaacataaaggagaaaagattcctgtgcagtaagtaagagggtagaaacgctgcttaagtttcgtgagtttttctatgaatctatttcaatttcaataatacaataaattttgaaattatactgcacacctattccaaaaacagttgtgtttaattattagcttaggatttgaactgtttatgatagcgtttcctttcttgctggctttttttgtttcttcatgaaagatagactctcaagattgacaaaagaacagatgtgtggcacctgttgttgtgcatatttacacaatgccacacttcatcacagcagaactaggctttcctgatgccggagcacagtcaagaaagtctgattgaaaaatcaatcatccaccctattatttagcattccctctgggaggaatgctctgaaaatgtggcttcttgcagatgtttcacaggtcaaacatatttctctctctctctctctctctctctctctctctctctctctctctctctctcactcacacacacacacacacacacacacacacacacacacacacacaccccaaatcctttgttggaacaaatggaatttctaacaaaaatgattgtttgaaagaacaaattagatgtaccaatttgaaggacttgagatatttagagctttttctaagttattttgtaacctttctaacctgctgatttgaaagttgagctatgttacttaattatacagtgtacataaaatgaatctgtatcttctcccatcactttcttctttgtgtttatttgtttttctcttttttaggtgatggctctcatgtcgtacacagtctcaaagatgtctggtgaacttgtaaaatgttaattggcataacagtaaaagtattcatatgtgaaggagacttgattggatttgctcaggcattcactgacaggcttctgaacaatttcatccagcaaaaccctatcattccagccactgatccatccactccttcactgctctgtcttcttgttcagatttcctatccttcctcttgtttttttttttttcttttaaagaaagtatgtttactttgttctcctagaccacactgacaccaggcacttatttacttatttattgttagttttgtaaatgtgtattgcatgagtttatgtatataacatgcaaacatgtacccatagaacctagacacccttagtctccctggaactggatttacagccagcaatgaacttcttgatatagatgctggggacccaacctgggtcctctccaagagcaggaagtgatcctaactactgcctcatctctcagccctgacactagtaacttctatttgaatgttgctatatccccacccaattaaagatccataataaggctctcgtgtcagcaattgaatgaaggagtaaagttttcaatcgttccttcctttgctgcttatgttttctgtgcacaaatatatactatctattagaaaatataacaagaaattcttcaagacccatcatccttaaaattccttaggctttataattgctttaaagatcttgagaagtgaactaaggaagtttaagagacagcatccaaaactaatctggttggcaagggggtggggataagagtgggttacaagcagaaatcaggacctagttcctgccatggcaaagggaaataggctgtaggtagtgcaacctgaaggatttcagagggtttgtcttagcagatctactggtatctctgtgggctggtcagtgctgtcataagtatgacattacattgtgtggcactggataggaactctcagggctctgcttgggatcccagtaggagtaagtgaatatttatgagcaactaagggtctgagagctatgccttgcatgctgctgttaaacaacacatagtaacaacaaaagctttttgatcaagcaaacctgaacttgatcccaaggctctgggatagattgttctgtgagcattcatttctatggaataggcctctgatttctagctttattacaaggattggggccttgaaaaaggctctaacttcctttttccgtcatgtgtgtgtttttttttttgagagcgactcagttcctgaggaggcttaacaatcactcttactggctgaaccatcttgccaatccaatttgtttgggtaaaaggagaaaatgtgtgtttttaaaatcaataattttagtttttaatttttttcaaatatttagatatacattacatgatcttcttactctgtacctgtttttttaaaaaaagaattgtttatttatttacttattttatggatatgggtacactgtagctgtgctgatggttgtgagccatcatgtggttactgggaatgatggttgctcgcgccggacagcctcactatctccggtgagccccagtcactccagtgggccctgctcactttggcctaaagatttatttattattatatctaagtacagtgtagctgtcttcagacacaccagaagagggtgtcagttttcattacatatggttgagctaccatggggttgctgggatttgaactcaggacctttggaagagcagtcagtgctcttaacctctgagccatctctccagtccctctataccctgttaatgttagaggcaagcatagtttacttctgagctatgaatattaaaatatatactattcataaaatatgttttattttagaaaatgagaacacatagaaccaatactttctgtattgttattaaaaatatactgtagacatctctaatccaggtttaccagaaagccatttaaggtgctaagcaacttcagcttctgcatacattatgttgtggtgtcaccttaatcactgaactgggaaggattttggcggtgcctgtcttaaagctttcttgacctgtgaagaacagcacactaagtaatataacaatggcttgaagtaatttataaagctacctgataatccccttgctgagacctgaggggataaggtagaaaagtgccacattctgataaggggttttggttaaagccaagcatgaagaactccaaggtgggaaactagggaatgtccagcagcctgagcgccacctgtgtctgagggcagtgacaggaaagaggaaaaggacaggctcagacagtgcttcccattgcaattttatttgggaccaacccagcaaataacttattagaaaatttagaaaatattgctagtgaaatggagaagtggaaaatgtaaatgagatattcaactggatagaagatagacaggtagatggatggatggatggatggatggatgcatagatagatgatagatagaaaatggatagacgatggagtatagacagagagattgattgatttatagattatagatacatatatagatcatagatagatgatagacagctatatgatagatgacagaaagatgatagatgatagattatagacagattgattgatttatagatgataaatgacaaatacatatatagatcatagatagatgatagttatatgatatatatatatatatatatatatatatatataggtagatagatagatagatagatagatagatagatagatagatagataggcagcaaacagagagacagaagaagtcaagtaggaaatagtggatctgaaggaagatgagaagggagtctaggtactgtgaagttaaagaacccagtgaccattttcaaagggaggaaggcttggctattggaaattccataagtgattgagttaggatggagagtgaacagattcttgcttaagtttctgctgatcttgctgtgagatagtggtcagaggctcacacgtaaacatttgatcaactaagtcatatgatcttaaactgaaaacacttttgataagtaaggttgatgctaaattctgtcattctctgagcagcttaaggaatttgttgggcgatgtcaagactgaattcatatgcttgtgactatagcttctttaattctttgttgtcataataggagccaaagttgtgatgaaagtgaatttctaaaaccatttaacattttcactttttagatatgaaatcaacctgagtgaaagaggcaagtgtactgcaaatgagactaattagtctatagcagatatagcagcagatatctttagagtatgtagttcaatgcatacatgaatgtgactttcatacattaaataagacatctgctcctggcttaaaagtgaataaatcaaaacttaaggatgttctataacttgcatacaagtgacagaaaccacacaggaggccaagattttaattattatgtttcagtgctaactgatcaactaagagaaagcacaatcacagaatccctgaaaatttgatcaatatttgatgtagaatttatttaagctagaattcatttgtttaacagttactggcatacacaaaatagtagctgtgatcaatttgcaaggttgcatgaggatcttgactctgtttatagctagaattcaaaataaagaaggcataagagcagatgtttcatatttagagctacacatagagctttaacattgtaatcaccgcctctagcgactcatccagaaatatctaaaatctcgaattaattctaaaatgctgaatggagtgtttggcatttgtatgtagaacatcaaagatgataaaggtttttttctctaaagagagtctattaacagaagttagacaattgtgtgatgagttctcacatatttagttcttcaattaaactgtggatagtactaaataagtaatttatgactcttgaatagacatttttaaaaaaattgtaattgtcaaataaagagagggatccattacattttccttggaagttatttccattttaactaattaactacacagtaaagttaatttaaacaatgtttgactttttgtaagagggatctaaaaatattttatttgtattattttgtatatatttggatgtgttgcttgcacttatatccacacaacatgtgtgtgcatgatgcccacagagacaaaaatagggcatcagatcacctgggattggagtgacagatcattgtgggtgctaggaattaaacctgggtcctctggaagagtagccagtgctcttaatgactgagccaaatctccatccccctagagattttgtctgctgagtatttcattgtaagatctatagagcaggaatataaattcataaaggcaatgatgacattaccaaagcattataaaatgcacaataagtactacacgtataagtttccttttaaacagaatgaaaattgcatatgtgcagtggtaagtttaggagtaaggctcagtccaataacaaaattgttcatgtaagatatgatgatgtcaattaagccatgatatgtcaatatattcccaaatatattgccaatattcccaaacagggtcatgaatgatcacatcatgtttaaagttctgtatcatggaatttgataccaaatgtataataataagagaaaaatacagtccactacatttaaaagtttgtgtatgaaggcatgcagtcagtagactgataggaaaacccatggtctctatttcttaggagagaaattttgtatggcataagctgataaagagtgtttaaaaaataatttaaaaagtaccagcatggtgttccttcccacctttgatgatttatgttccagatgaaagacaaacacagccttatattttaatatgccttaaggagcacaatagctgtgcaactttctaccctccatgctgttagcatctacctcttattgataaccccattattactttaatgtcacatcttggctgctctaactcctataagtcaggcctctgggccacattctcttggcccctagccccagcactctccttgcttctttagcccgtaatggaccccgtgatgtcccttctctctcttcatggtctctagcctgggaaacttaaaccctatctatatctcttcaccccaactgttggctactggcatctttatttaacaatcagtattaactgccagcagggtccctcaggctatatgcagactccaaatattggagcctagcacttagtgatagaatataatcagtattaggccaacccaaagggtcaaaatgcagaatgtatgaaaatgtaacttaataacagctgactgtgttaagagaaaacagggaaagattctgagtctcatcaccacagaaatacaatgtatctctacagaaatacatatgttcacaaggtacataaaatatgtttagtatcactcaggaaaatactaatcaagaccacagtgggccaccctttcattagtatggtatctataaaaactaaggaaaatatcaatgtaacagagaggatggagaaatcaactcatctgtgcaccactagtggaaatgtgactggtgtgggcggtatagagaaactgcacggtggctcttcaggaaattaaaaatatgagaaccatactgtccaccctgtgttttcttctttgagcatataaacaagagaattgtaactggggtcttagactgatcctgtgcatctcttcacagcagccaagacataggagcaaacaaatgtcccttgaggaatgatgaacaaaacgagcatctgcagactgtatagtatcactaataaactgttaggatcttatactattggcttggaaacagtttagtcagtaaagagcttgctgcacaaatgcagggaccatcatcaatgcccagaactcacttgaaaaaattgggtggtgatgtgagctggtaaacccagctctggggagaagagctggctggccagctagcctactccaagcagagaaagtgagctgaataagaaaccttgtctcaaaagaacaaggtggagggctcctaaggggtgatacctgggactgacctatgccttccacacatacatatgtatatgtgcagtcataatcacataaatttacctttgggtacacacacacacacacacacacacacacacacacacacacacgcgcgcgcgcacacacacacacacaaaaccaaagatattgtactaaatgaaataaagtcaccaaataaagaagacaaaagtggaatgactctgtgtatttaagatgcctacaataattaaacttctagcaaggaacgcaaagtgatatttgaggatttgcaaaaaatgagatggcatgtttttggttaacaggcatagattttcagttctataaactgacaagaactgtaaaggtggatgcggctggggattgcaaagcaatagcaatgaatttaatcccactgacatacatgcctctaaatggatggaatatgaattttatattataccttaccacaaattttaaaataaaaagaaacaatcgtctgtgcaatatatctttaaaatcactaaaaaggtgggagaaatttaagtgataagaagctgactttatgagtaatcaattgagtaatcgactaagaaggaatccagaactatttcccaagcactcataaaaatgaaagtgtgtattgaaacactcaattgcatgttagagcatcatataccctgatatataactatatggtatgtggatatcaattgatttctccctgctggtgatgattttgtggctgtgatggaaaataccaaacttgaacttgaacatttctgccattacagatctgtggccatttgtttccatggttacaaggcacaatgaggcacactggctcttggaaattgtggacctgggtgacaaccttcctgcttcctgcatgtacctgtctgacagtcagggacaagccaggtatgtgggtcacctctctacctgattgattaatgttatctatagttcttaagccattaaaaaaatccatcaaagcaaatcttattaaggttggagaggccacagattagctttactgatagagactagagaaatcagtattttctactactgaccttcagagtaagaccatggcgaatttccaaacttcatgtgcatgttatcaaacttttgtctgtaattgaaacttataaatatgattatatgcatgtatgcctctgttcatacatctgacatcatctcacattttagcctttaaaaataatttgttcatgttataagtctacaagctcagcactaattagaactaacaaggacatgtctacctttaattaagaagaagtgaaaaagagactcagaagtgtaaaaagaaatagagtttaattgcatgtcagttttgtggtatcttagaggagagaaacaaaaggtgaatacatctttaaaggatccaagaaaacagatagtatttattttcagttattaaatttatgaatcttgtcttaaatattcccaaagggctttacagcgatttggagcatttattttattttattatttatttactttacgtatatgagtacactgttgctctcttcagacacaccagaagtgtgcatgagatctcattacagatggttgtgagccaccatgtggttgctgggaattgaactcaggaacctctgaaagagcagtcggtgctcttaaccgctgagccatctctccagctgatttggagcatttatgttcagcaatgatttttaaaattaactgtgactgaatagattattaacctatacagcctttatgttgcaagttagagtgactatattagagaatatataatgtgtgtgtgtgtgagagagagagagggagagagagagagagagagagagagagagagagagaaagagagagagagagagactccatgtttactgagtaccacatgagatgcattcaggtgataatcacaaatggtgttgtatcgtgagtcagaaccttgctctgtatattctcttgagcatttcttgagagtactcctcagctggttatcttcaattactttgttttaatctctaactttagcaactcgttcatttgtaagaatacttgtcatcacctctgcctctgttaaaataattacttcactgtaagtaaagagaggtaaataggtataaactccctctcaaggaggcttttgagtttactcacacataggataaaacctcacttataaacatttaacagatccttgtacatttaattatttgtcaataatttcacaggaagcccattttctttgtttgttttttgtttgtttcttttctgagacagggtttctctgtatagccctggctgtcctggaattcgctctgtagaccaggctgcctgcctctgcctcccaagtgctgggattaaaggcgtgtgccaccactgcccggctaggaagaccgttttctaaaacaatccacagggatgtttaaatgctgtattaatatattattaatactatggctgtcacaatcttggcaaaaagcatcttttcttcggcgagaaataagtgaacagcagcagcagctaacaactccagccatgttacagtaaaaagcgcgtagggagagtgactgtattctgaaaatctgcccgcgtaagtttatgttgctttaggaagagcaggggatgtgttgcaatttaacactgatggctgggcttcctgacttagaagggaagataaagctttgtttgagtggcccaatattttggccatgctaatatgtagaaaacggctttgaatggaaccatggttagaaggatctacccatatggttctctggttttagcaagagaaagagtcatggcatgtactgatacctgactgctgttgatgccatggtaaactcaggactttacacctttgacaagccaaccagttgagtctaatgcaggatgaatgcagcatgtggggaaatactctctctggggataattaatgccattttattttccttctgattcactcctaagatggttatcttccgttattttgttttaatctctagctttagtaacttgtttactgtaagaagaaggcttgttatgttttacacacacacacacacacatatatgtatatgtatatatacagatatatatatatatgtatatgtattcaaatgcattctagctccaaataccttactgaattagtttctttgaaacatctttccttaagaacccaagtcgtaatatttacaaaacattgcactaaggggattattcgaggcaaaactgagttgggtcaagcaatttgctagaggggtgcctgcaaagcaagaagccatgtatattgcttcacttcaagtatcatttgcatgaactgaaaatcagcacagcactgtcgcagggtcggttggagaacatgacccactgccaccaggtctgccaggagactcttcttgtgtcgtgccttgtgtgtctgattcacagtgcaaggttcccgttttagtctcctcatgtgcagacctgtgtgtgtggtcactaaccgtttaccggagggaagtgattacatctaaaaataaagtctagcaaatctgcgggagaggctagggtttcaggtctggacttggtgaggttgtcaacagtttacagttaaaaccaaatgtaagaaaggataactcaagtctccgtggctgtcctccatgctctgacagcatcagtgtctccgtggaatattgttgcaggtggggcagaatttaagaatagtttggaagagactttaagcatgtaaattgaaaaatcttgaatccaggcacttccaattctttgattaagcttacattatattcacattatgggataagatacatttgtgtattttcatactgacagtaatatccacttgactatttgatagcttcacctgcgttgtcagggtagagaagaaaagcatattgacatatgtacaatgctgggcaatctccaaatgtgctttaatcagttgcttagaactggatcctctataatagaactgtccacatcacatggttaatttctcttagtgtatccttgtattccataacaaattattataggaaatcttacaaaggaaaccagagtgaagagcacaggtggaatcaaaggcagggcaccatctaagagaacttttaaaaacaatttccaaacagcacataagctgtctagtttattctgaagactctcacgggctcaaggtaacacagaagccctgttaattcaattctctgctaagtgaaagggaagtttgttattctgaaacatagcttatatttattgataaaaacctcttattaatctcatgtagaaactttaaataaatcttagtgctcagtatggtaccacctgaaaatcttcaaagcgacacacactgtatttaactcttaaatttggagagtagcagaagagatggtgtccggagaacatgcctcttagccaagtaactcctctagatgatttggttccgagctcactagtgaaggtacttgtatgactgcttgtgagctctcccttaaaatagttctgccctggtactttttatcatctgccacccccttcatagtatttctgctacactatagtccagtatgctttgtctactcctgttagccactgattagctcccagcattgagcagcacatactcagttctcaaatgctttcacagcatatatagtgtgtgcacaggggctggaagcacaaccaggaaggatgagtagagaaccccccagactacctccatccaatcagaaagtcttgtggaagagttgggggaagggctgaggaatgcagaggggatggggactccacagaaagaccaacaaagtcaactaacctggatccttggagtttccagagactgaacctccaaccaaagagcatacaagggctggacccagacctccctgcacatatgtagcaaatgtgcaacttgatctttatgggggtcctttaacaactggagtggaggcttaccctgactgttgcctgcctgtgaatcccattcctctaactggtcggtcttgtctggcctcagtggaagaggatgtacctggtcctgcagggactgtggttgcctgggtgggttggtacccagaggtgattgccctcttctcagagatgaaggggaagggagacatggtagagggtgagtctgcagggtttcgatcaggaagtaaagtgaataaatacatttaaaatacagaattctgttttagcctttaatatatatatatatatatacatatatatatatatatatatatatatacacatttatatatgatggcttagtcagtaaaaggcttgcctttcaatcagaagaacctgagttcgatccccaggacttacttaaaaaaaaaaaattccaagcatggtggcacactcttgtgatttcagccatagggaagcagaggcttgcaggtcagtgagcctagattacaatatgagttgtaggccagtgagagaagctgtctcaaaaaacaatgtgcatggctcttgaaaatgacatcggaatggtcctctggtctctgtatacatgtgcacacatctgtacacaaacccatatacaccttcacacgcacacacacacactctctctctctctctctctctctctctctctctctcacacacacacacacacacaaaatacagaacacccaagagatgttttccatctgtttatgcaaactaagcagtcccacatctgcaaacacccgctgtctttacgttctccaatgctgatcttgaggagaagtgggatcataagtaaggaaagtaattttccttaatgaaggcttgagattgataagaggactatcaaatgagctagatttcaaattatagttttataagtgaaagtcatcgcatacattatgtatgtgtctgtggatctgaagaaaggaagaatcaaggcagaataatcaaggcacaataatcaatcaataagcaaatttccccaggtactaaggtgctctcgttctcatctcttcttgtcagactttctgtgtgatcgatcgtctgtccccgtgcttcagaacgagttatgacctttactttttgtgtgcattgcagctttgatctgtttcagttttgtaccttccttccctcccctcccnnnnnnnnnnnnnnnnnnnnccctccccttccctcccttctcttcccttcccttcccttccttctgtctccctccttcctcccttctctgtctgtcctccttcctctttctctctgttgttaagattttagttggggtgtaatatttgtatatatttatgtgatgcaatgtggtgatttgatatgcttatataggtgtggtgatcaaatatggtaagaggattgtactggctagttttgtgtcaacttgacataggctggagttatcacagagaaaggagtttcacttggggaaatgcctccatgagatccagctgtaaggcattttctcaattagtgatcaaggtgggaggtccccttgtgggtggtgccatctctgggctggtagtcttgagttctataagcgagcagcctgatcaagacaggggaagcaagccagtaaggaacatcccttcgtggcctctgcatcagctcctgcttcctgacctgcctgagttccagtcctgacttccttggtgatgaacagcagtatggaagtataagctgcataaaccctttctttcccaacttgcttcttggacatgatgtttgtgcaggaatagaaaccctgactaagacaaggatttatatgttcttaaacatttctccgtgtggggaagtgttaaattcctattttctcattgtttctaataatttatattataatagtataataattttcataatttataattatgtattgttaacttgcagttgtttcttctgtaagatggaacattgaaacccatttttcaactttcccctttccctctttctctccctcccttcctctccttctccttccacaccctaactctctctctctcttcctttccccccttctcaagtttctagttttcggaacaaacacctaacataaggaacatatttggcccacactttagagttcagtttagtttccagcacggcaagaaagtcactgtaccaaaagattaagatgactgctctctttggttggtgcagaggatggccccatctggcatcaatgggaggggaagcctttggtcctgtggaggcttgattcccctttgtggggggtgctggacgggtgaggagacaagagtgggtgagtggtgaaaggttcaccctcatagaggcaaagatgggggatgggatggaggtttgcagaggagaggggggacaacatttgaaatgtaaataaataaaataacctataagaaatgacgggtctcattgcagcacagttgggaagctgagagatgaatgtgggtgtttagcttgctctctattaatcagcccaggcacccagcctacggaatgatgctgcccagacttatgttgggtttcttaactcaattaacctaacagaggtctccccctagagagaccacaaagactgttgtctagtaatcctggatcctttaagttgacattaagcatcacgccttcaaggattcatgctattgctattccaccctctacttttgatgaggtgggcttttcttttttgggcatcaacatctgaacaagaacagacagtatttttcttcccatggcagacttgttcttcttaacataaggtcttccagttatcctcagccgtccaccaatgagaagacccaattcatctttagggttgaagcccaccatgtgtggatatactacattttctttgttcacttacttgtcatcaggcattttggttgactccatagcttggctgttatgaatattattttaataaatacctaaatgaacatttttgatgtaagaattatagttcatttgggggtatatctaatctagtagtggggtagtcggatcatgtaatagtttcattctgggttctctgagaagttccatactattttccacagaaactgtaacatgttggtgtcatcagtggacaagagagctcctctccatcgccaccatctccatctcttttttgtctttttcgtcatttgaattggagcgagatattctcactgagtttggatttgcgtttccccgatgctgggtgatgctggcattttccatgtttttccccccttttgtacattgtcctcggagaaattcagataatttgcctgtttttaaatcagtatctgttttgctcttgaggttttagagttcctttcatgtctggttattaaccattagcctctagtcagctgaatagtttgcagatttttttttttttttggccatctgtctattgtctctttattgactgcttcttctgttatacatagcttcccagttttatacaattccacaattcataaacttctatgcagccatttcaattgacatctcaatcttaacacttccagaaccttccactgattaatacacacgctgtcaaataggggattccactgagtcagacttttatctagttaagcagagtaattgtccttcctccttctagacatccacctgccacatcttgctgattcttgcttcgcatttcctctgctttttcccatccctgatgctttgtctgtagtccaggctaacatcatctctgggctcacagagtgtgggaaagcaaataaagtagccagataagaatctcaaggaccaggctaaatctgaagtttagataaataatgaatgatgttttcatctatgcctgggtattccagatatttttatcagtcttacttatgctaaaatattttcattatgtatctgatatttgattatgaaacttttattcatttcctatgttgggcaatcctatatggtataatgggaagacacgggtgagcagggaaggctgagctcatgtaggcacagttgagtggaggtacaacagcaatgaggataagacacatgaacatctacaaaacatccagcataaagattctgaggcagaggacagctcagtctaaggaagaaatggtacagaggccaggatcctgcagttgagggcaagaggggcaatgaacctcaggctactgtgattgtaaaaactctgacgtctaagtctgcaaagtcaaaagagagaccataggctctggcacattgaccagagcaatacacaccatcttgtgggttctcctatgaaacagtgtttcgcttgtctgtttccagaaaacataaattgttctcttctgcattagtattctaagtctttctctcagacttaactcacacttatttgagagctgtaatagagtcacccatttttacccataagaactatgttgtggatcccactggctgttacaaattatggttagcactcagccttacatacactgtctgccctatacatacattgcttacctgtagtgaagagcagcctataaattggactcagtaagagattgacagtaaagcaggtaccaaaaatagaaaaatatggatattctgtaatatacatttaaattaaaaattatttctggaatgatttcaattaatatttgcagatttcagttgcacttaggtcactacagctcatgatgcaaaactcagaacaggagtgtttctgtggtgtataatacacaatgccctactgctaaaaggctgacatgatatacacactttgtttttatctttgtatttaaatcatatttagatatattcattttgttttatgtgtttgaatgtcttgtcggcatgtgtacatgtgcaccatgcgagtgtctggtgcctgtagatttcagaagagagtgctggatctcctggacctgaagtattggttctggtaagctactgtgtcgatcctaggaacccagttctgtttctctgcaagaacaacaagtgatcttaactgatgaaccatccctttatacattttagcaaagttaaaatactaattatatcctctccctgcaaacgactcattttcttttcctgcaatacgtgaagtgttttgtaaatactaagaccttcagtaaactataaagagtctaatagaacatgcttgcctttattcttcatgacgctgaaacctcagtttcctcggtagcttttgtatacacatgaatgaacttacctcatgctttttcctaaactagagttgcagagccaaataactcatatttgatatgaccaccagtaaacaaacacaacaaaactgaaacaatagattttagctggccttagatatggcaaaaaagggcgaaccaatcaatcaatcaatcaaccaaccaaaaaaaaaaaaaaaaaaccctaacaaaaaaaagctgaagaaatcccaacatgctgtaagtattctggtgaataaatactatattaaaatgatgacttatgtaactcaaaatagaagaaaagggagcatgtatttaaagatgagcaggcttttttatttgtcttcttgacaaacaaaacttctgtttgtctatttatatttttatattgtgtgtttcagggatcttgttaaaattttcttgcctataaccctattcttatacatatgtttaatgtttctctgcattattaaaaatatttcttatggagctagagatatggctcagtgtttattgacacttggcacatgaaacatttttaaaatgtcttatgaaaagaagaaaacttctctcaagattctagtaggccaaggctgctggtaaaagcagaaaggagctgacatgttagtgtgtgtgtgtgtgtgtgtgtaaaagtgggattcattttttaagcacacatttaaaaccaatgggaacaaatgtattttattaaaggagggggtttcgtaggtatgttattactttgtttagaatatgttattgagagatgtttaataaggaagaaggaaaagttggtttacaagaatgtgttttattctgaactctgccattgagtagctcagtgattgtgtttctctagggtgactcttttttcagaagaccagggaacagagggttaagagatgcctcttctttaaaggcaagtgagataaagtcatgatgtatgcaaagttgagctgctgatttcctttctgtttcctgccgctcttttcaggatcccagcagcctcatagacagcccaggtctttcaagccatgtagagaggaaattaagtctgacaatgatcagcattaacacttcagcatgcatctgctgaaatgacttgaatttgcttgtgagaaactgttgagttctgcaagcactgcatctttctgaaaaggatggcattcattactcttagaaatactccagagagcctctgagggacagagttgctgtgcttggtcctgtttcttcaaatattgtgacatttgagtctcttgcataagtctaaagtcacattactattaaaacgcagatgtatgtttgtatgttaatattttaataaattaacatattcaacctgtaatagttaatcccactttttattaaaatgcatatatcaatatttaaattaattcacatatctagcttatggattggcactgatactgctttgtccattttgtgcagcaaattcatgaatcttcatgaatttatcttattgtgccttaaatcttaaaacacttggttttaatttgctttgctcatctgttcacaacaaagcatgtggtctaaggtaggaaatggcatttatgttttataaactgaatacttttaatggagaaatatataactattgctggaaatgttgaatcccatttattttcagagcagggtgtttattccgttgacatcaacatccatttgctaggaagagtttaaatgagatttacagtttcctactggagacaggccacacacctccccctccctaccaaaggctcacagcagggaagcccttctgctgcccagagatttgtcccctcaatcacatactgaatctttcctgtatgtgcacacaggatgaagaatgcaaggttcttattaccatttattggcttataaatatccgcagccaatatgcacttttattggaatttttgataaatttaaattatagaattgtttttaggtcaaaatatttactcaagagggctgctgggtttccccctgtgttgagattttgcatatatagggctgatgtcagtagatgttaaaggcacaacacgtgggatttttttttttacatgtgtctgtgtacatttgtataactattaccccagtaaaatcataaaatatatcctggattctagaagatttctgtgtacctgtcctgaggcaacacctctctatggtaatcactcctctgaagcagattggttatataattatcacattaatggaataggtaaaatttatttaggggggatgatacttccctagttagtttacttctaaggtcaaacagtttcatgtatcaagtcaaataatccttccttccttccttccttcnnnnnnnnnnnnnnnnnnnnnnnnnnnnnnnnnnnnnnnnnnnnnnnnnnnnnnnnnacctcttgttgataaacttttaggttgtgactctctaagtaacaatagcatgggcagtcttatcgaagaagatcatttgcagtcctgtttggcttttacgtctctttgggtcattgagttttcttacttagagtcacacatcattaacttccataaatactgtcaaaccgttttctcacgtggtcctgccactttccaccaccacatgccacggagaagcttgggaaatgtcaccctttgccacaccctcatcaacactgccagtgacggttctttaatttgagtaatttaacagaatcttagcacggcttcctttccacctcttgattactaatgaagtggaacacttctgattatgtgggttggtaatttggatattctgtcttgtgaagtgtgaaaagtgttttgaaacaaacctttttatgatttgctcatttgtgggagcccagggtttgttctgggtacagtacttcgctgcatagtttctctgcttgtgtggtttgccccctctctttaaggtctatgtgttaaaaagcaccttctcctattcgatggcttgtcttctcacacatctgatcttttgattaacacgtcttttaattttaatggagacctgtttaccaatattttcttttgacagtaatgctttacctctttcaaaacatcctttgcttctctggtttcacaaagctttatgcattactgaacctctttaggttttacttctcacacttatagtaatgtattccagtttctgcatgtggtgtgaagatcaagattcagtgatttcctgtatcaatgcctaacaccagaccccactggtgaaaagaccttccatttcccattaaatttctgtagtctttttttttttagtaaatgaagctatatgtgaaagggtctgcatttggacttcctgctctgtctgattaacgtgtctttctatatgtacaccaatgccatgttaaaagaattcctggtatctcacgtctgtctccaagttactgttcaactttgcctctagctattttttgtttctttgttcttccatttaaactaaagaataagcttgccagttctcaagcaccacacacacacacacacacacacacacacaatacatacacacacatacatacacacacaccacacacacacacacacacacacacacacactgtgacttataggaattgtttgacttgtaagatatgtgctaaccctatttaaaccttgagaccgttctagttaaatatgctgtgctgagtccatccaaccaacattagtctgtgtgcatttttcagacgaagggctgaggcattcagtgattaactgggaaatcagaggttttcactttcagccaagcagatgaacagcttggtcataaggagtttatttcctgtttgtactataaagtttaagatataaacctttgacgtgtggaaaattgaacgtgtgactgaatgatgtacttagattaggagtgtagctgtggcatgatttgaaaattgggtggcagttttgcctgcactctttctttcgttagtaggtctgaattagatttaaatatatcagttcaaagaataatgtatgtgtatagattactgcgtttgtatgatgtggtttttttggacacataaattcattgaatagagattaactttatctttatctctctgaatatcactgacacacaaagtattaattttctcgatttttatcatataagaagatctctactttctaattatttttaggttttttttttctgttcatgttccattgtgtcataaaagtttacgatcatgatcatctgattacaaaacctggataaagttatgataaaatacagtaggaactcacttgtttaactggttggattgaagagtttaatgaagctgtgaaattcagttgaatcctattgtcaaaactatagaaacacatggacgtctgagcaatagtgataacactcgtccacataagtgtgttttcaccatgggccaggcaatattctaaatattttatatgaacaaacattaaactttcatagacatacagaggggaggatagcattagcctcactttacagaaatctaataaatgattcaattaggttttattttcaattttatcttctttatgattttatggtagcagtcaactttatttgggaaaagtacgatgggaaatttagttcaaattgtttgtttgtttgtttatttatttatttttaaatagaaacaacctgccctacactgagaacagagagatatcaagatgacagaaacaaatctgaattgtcaggtaagcattataattctttgctaggtagtactttgtgcgaagttatcaccagatacaccatagcccaatttttggggggcatcattatcagaaattttgtggggtcccttcatagtggccagatgctgtatgattgaggcccccgggagtggggattcagggagggtaaagtatattatctcattaaaggaataactattccacccatctctacagtaggacttaacagggaatgcactgtcctagggtggctcctcagccagctcattggccctgccagatggaaagttaggtctctaccaagccagagatttttatcccctgactagaaggtgagccttagtgctactctgcccgcattactggttaagatcacagcatccacatagagaagtaaatgctgaaggagaaatactgacagcagagttccttattgtctcatctcagagtagcagcaagtccctgtcccgtctctgttccctcaccgcagaatgaacaaaagctgtgtgaaatcacaggcatccatcctgccttctgctgcagttttgaaaggagagaagaatatttatgaggtgttttagcatccagatgtcacgatttccatacaattttggtgcaacatttttatattttttattttttctatttttttgggctattaatgttgtcattgctggattttttattattgtcattttctttgcttgtttgcttgcttgttttttgtttgtttgtttgtttggttgtcggttttctttttgaccaggtcatcccaggctggtctcctcctgcttcagcctctgaagtatattctaggtgtgtgctactaagaccagccaacattcctattcttctctcccaccttcctttccatcgcctctctctgttttctccatcactctcgcacacgcgagatgataacgtgtatgctgcgtctggattctaagcatttcctcacgttcctataattctcctgaagtatggttttgtaagatgctgtccagattttaaaccagttactactactttttactccaattttctgtttacacattagagacggcacaatgaactattgaaataacttgcttaggtcaattcctagattaaatcggagtggtgttttattccctgtaaacatctgtgagggggcaagcatggtggcaagcatgtgcaatcttagctaattgctttgtattcagaccaggcaaagccaaaaaaaataaataaataaaaaataaaaaataaaaaaataaaaggacgatatttacgatctgttctttagaaagatggctataccttttgcatgcaaacagaattttattcttctgtaccataaaaggaaaataaaaaaaaaagaaatggaacacatttgctgatttcaaacaggagtttttattttagtttcttttgttttttgtttgtttgtttgttcgtttgtttgtttttaatcaatcaacctgtggatatggataacaaagaatcctgtttaaagatcaatacgtctgtgagtttattgctggttttaataacatgtcacattttacaggctttgatctgggagaaagctttgctctgaggcatgcgttttgcgaaggtgataaaacctgtttcaagttgggaagtgtgcttcttatcagagacactgtgtgagtaaagtaatttgtttttcttttcatgttaaaaatgctacaaaattattttctaaggatattccaaattattgctcaaaaattaaaaagctcagtagtgtaccccaaagctgtaacaaatacacaacttatgtatttattattgataaaactctgaaatcaaatcctttatatgcataaagaaatggtctttagaaaattaaatatattttggggggagaaacctaattgacatttaacatagacataactgatattatattttaaaatgtgaactttgaaacataaggctcaatgtagattcagagacaaaagactagtactatatttattcccgtgtatactctgctctgtgattaattccaataacagcttacccttgggtgctctctttgtatatggaatagagtttaaagggtagagaaattgttttgcagggctttttgtttgtttgctatttgtatcttgggtcagacttgaacattcccgtgtgtaaatgtaccattgtggaagagcactatgttcgccctggtcttagcatgcacatagatgacttcgtgtgaaaatgaattgacatgcgtgcgtgttctcgctttcctcgggagtcttcttgcctttccagtgattctttgttttagacttcctgttttgtgacactttggattactttaatttaacgacgttcttctgttcattcactgatgggaaacaaagatactgaggaagagcataatttggtgttgcagggaatataaggagggaatgtcacgtgggggggggcttctgtccggtgccataaggtatagctgtttatgggacctatgagcagccactgaggacagcccaacagttctgtgcttggttacacatatgctgtaaggaaaagcaaggcacacatgcgtgcatgcgtgcatggagtgcatgcgtgtgtgtgtgtgtgtgtgtgtgtgtgtgcgcgcgcgcgcgcttatgaagggggaggttaactagtagtagataacatttattaatacatttagaaaagacaatacattatgttcaaaaattaagatgcattttttttcttacttctttttttccgtattgatctaaatcccagcaatcctggcaatgtgggaaaagaattgattggacagactcattttaagttcactggacttttaggaaagcagattaagcggatttgaacggtactttcactactaggcaatgctgttctccccttgagtccacaggattataaatgtgaggcttgaattgaaattcgtttccaaccttagctctaaatcagtcctcagcctctagacaatcaatgaaagtgcattttctggctctgcagagcataaccctgttcctccaggacaggaaacaggagggtgtctgcttaagccgactcccgactcccgagtgtcaagtctcttgactcatccccaggttcgttttgctcaggcagccaagtgtgctaggatgcttctctcgcatatgccattttgggttttcaatgggcctggagtaaagttgcagctatttatacgtttgtaaataagctgccctgcggagtcagcatgggaaaaggcggatgctattttatatggaaaatgaaaatgctctccgtgcctgaacttgcttttattgttctggcacgttccacttgacgttcaggagggaagaagccttctgagtgtgggaatcagaaacctatctgaggctcaatatcctcagcctggcttcttgagagacacccaaagtttgctcaggcaagggttttcaagatatctatccttatagctttattactgtacacttagagctatattgactctagggtatctgaagcgcttgctatgtttttcataatttgaaactcctgtttcttcagtacttcttgagctaacaaaaggtgattattagagactggctctttaaaagaatctaggtggcctcctatttagttgtctgaattatcttgtcagagtaagttttttgtcccactcttagggttcttagattcattgataaaagtatttaagaatggattcaaatggatccttgaaaacaattttattggtgttgcaaagagagacactgagggtatctaagtagcaaagctcatcagctgcccagagaaggagaatgggagagaaaagaaaagcacgatttttgacaggtagaggcatgtctgggagtaaggaggcctggagtgtcagggagggaaagcttgcttcgctcagagtataaagatctccatataaacggtggaaagaacagggaaagttacttttctgtgtaattgcgagaagtgagcagttgcactctatatggatactgctcagatgcactcggtgagacactgtgctatgcggaggagtccagggagggcaggaacagtatcattaaggaaaactactccacctgtctctttagcttatcttaaggggcaggggggcggtgtctaccttgcttggaccttggacaggccactgacctggcccaactggaatattacatcatcacctaggccagagatgctcttctctcttctggatggagtttttttcttcatgagctttaattactactcacaatgcaagggtgatgggtcatgaattttgaatttctacgtattattgattctaaagtcatggtgctcagagctggattgggaaatagatgataaagttcaagacacatattttctgaattattattgattccaatgtggtcaattaccctatctctcaggctatttatttatatatttatttagatagtgaccgtctgaaatactatgttagcatggattctgggctgtaccgatttgtgtagatttttagcactatgacccttcaggagaaaggaaagtgtagcgcactcaaatgagtttcaaatctgtaactgctctgacttatgatacaagtctggaagattttgggttttgcatttcaagtaacacctatgaataagggtgaagggatgctagccatgaaaaatatccagctaattagactttatgtgctaggataacattctttatttgttaagtatttaacacatatggcattgggtatgttaacaatcttaaccttttgcaatgctaaaacaattctacctggaatggaataaatacgttctgatttttgttaccaaaataatctctagtgagaggagtcatcttctctgtcccattaattacgttgttggttactttacgaaagcagggttatatagtaccaacattttcatagatgtcagggatagtcaaggagagggtaatggtggacatgagaggccaggagagggggtggattagtttactttcctttgaaaaaatgttgtgaccaaaaaagcttgtgaaagacagagtttattttgacttatgcttacagatggagagtccataaaggcaggggaggtggggctggtagcaggtggctggaacagggagcatcttcaactacaaaaagaaaatcgaatataccagaagtgggcaaggctgtgatctctcaaagcagaccttcagagatgtgtttgccttagtaaatttgaaccacctccatagacagcattgctctctgggaaccaagtgttcagatacttggtggggcttttcttatttaaaactaccatagtttggtagcagaaatgatggtgaggggtggcagtagacactaagttacaatgagatgggagtaagtcttggctttggattgtatagaagggtagtcacagataacaatagtacattgtacgtttcataaagacagaaaaagatctggaaagtgtctccttaaggaattgatgaccatttgaggtggtagatatgtttaatttaactttaatatcatacagtgcaaatatgtctcaaagttatatgataccccattactatataataacttttatatataattagagtaaatttaaagataggaagtgtgcttgcagtccattgagagggtagaagtgtcaataagcaataaaaaatgttaagaaaatgtcatataaataaacactgagcatgtctcaaaaggagggagtaataggtagaaagtattctgatctgtatttctgtcctttagactttttcaaggttccagactttagcatctccttcggaaatcacctgaacctgagtagtgcacgggatagcttatgtcaaaatgtacatcttgtctttgctgaaagatcgatctcatgaacatggctccttttcacatggacttttatataagctcaggtctataatagccgggtcttatagggagaacaacaaaatgcaggaaggtgacttttaatctctatgtatgattatttctgatagtctgatgtttagaaataaaaatccatctttagggatcttaatagagaatactaactctgttctatcaccttcatattcttgtgtattttgtactttctgaagtcttctgtagcattagggcctgtggttttaaattcatatctgttgtatttaaacttaaaactcttgcaattacaaataagggtgagagtgctttctaactaccatagatgatcctagatggttgtgttagataaagaataagtaacaagtagccttggtaagtccctgaaactcgtgtaatcaaagtttatttcagtcaacagactctgagctccttatggctcagcactgaatgacactaaggcttccactggtaagggatctgaccctgtcttttcttcctggaacctgctagagagatacagaataggagggaaagctacacggtcctaaacacttcacagctctgtccattttcctacaaatgtcatgatttcattttcctttgcacctgcacaagtatccagtgcattacattttcttcatctattcagctactgatagagaagcgggctggctccacgtcttagttgttacgaagagtatagcaataaagatggaaacgttacatcacatgcagcgtcccagactgataagccaaataccacatatttcctctcatatacacacataacgtataaatatataattattaatccacatatagctacgaaatttaaaagggaaccacaagaaaggggaaagtaaaggagaagaaaataaaacagaaggtaaaataaaacagaaggtactatgacatgaaaaagaagacaattgactggcgaggaagacttgcaggagccagtcaggaggatgggggagggaaggggagggtgaggattgacagggacaaagtgtgtatgaaaatgttgcaatgaaactcataatttcatatggaagaaaggaagaaatagcagctagagatagcagagttgggtggtttagctgttaaaaacacttagtgctcttacaaacaattgggttgggttcccagcacccgcatctggtggctcacaacttcctgtaactccagttccaggaggacccaacacttctggcctcttaagatatttgccctcagatgcacatacagactcacgcaaattaataattaaaaacaaataaacaaacaacagcaaatagtaatagtaaataataataataataaaatactactactactactaacaacaacaacaacgacaagaaaaaaatttttctttccctttgtactgaccgaatctgaaacctcctgtctttcacggtgcagcacagttcagctacaaagcacaccccctctgtcactgaggctacattttaagtatttggggattttcattccttccctcatatgggcctgttttctaatccacgtttcccttcttttttgctcttggttgggttctctccaagtactcagaaacagctaaattctgaggcatgaaactgtgctcagctctgacacaagattctaattcctgggcgggtttgaaggatcacttggcagctccattaagctacggagagtgactgcatcccctgggttttcctttggacattcttttgttttgagatagaaagcttcctatgtaagggccatgtgactctgctaaaaccctgtccagctgtttcatgagactgttacacatgaatctaaatgtcatcgctgcacttccttaattatcatctggcatgccaagaatgtgaggtgagtcactgctcatacattctaaaatgagaaggaaagtctactggacttcacggctacagaattgtctaagcaagctattttagcaaaattacttagtattagatctgaaagagtttaaaggtaacccttgtagaggttttaaataatgtatagaaatatttaattactaatagttaaaagaaattatctcagatttttaagagaaattcaaggagtttttaatcaacaataggttacttaatataaaaatgctactaaaatgtaaaaatgatgaaaaaccctccaagtatgtttgtttgtttcagagttttatattttgttcctccaaatttactttataattagatagatataaattaatgaacagaaattaaacaattgatacatctaacaatttagcagaacctgatcatataatttcaatatttttcaaggttatccttaagtattccatcatggggctcataaaaaaaatcaagcaacatatgaatacttcagttgaatgttatatcaactatctgtgacataattcctctataatgcaattttgaagaaccttcaagaaatttttgtatgtaaaaaacatgttagtcaaactctcagcccagtataaaggaacatttctcatttgtcaggtggagaattcttttgttcttcatttttaagttcaatatcactgagttgattttgttcaaaatccccttgggaacataaggaggtatgaatacaggctacattgataaaacattgcatcttttctagactctctctgcttctaatacttcagaagtgtaggcattgaagagcattcttgcattaattgcaagaaaaagtaaaggagagggtcctttgaggtcgcaactatgaatgcggtcctgtggttatacaaatcctgctttatggtttatgggtggaaaaaacatgaagcacattcagtttcttgtcagtcacatagcagggtttagggaagctatatattctcattatcaaacttaagttaactgggtagtcttcattcagatttcagacactatattattttgtaaggctgatttgcatgagtaattagccataaaggtatagatatagattggtggttcccttgactgtgaatccagagatgaataatcttattccttcagaaacttctaaaattgtgtatctatttgtgagtgttagcagacaaaacatttagaaactttaaatatttttatttcacatattgtaaatgacgacacaacaaagagatttatctacataatattaatatatgtttaacatattggtaaggtaagaagtcttcactatctccttcaaagagtacagtcttaaaagtcaaacaaaacatcaaacaaaaggaaagcaaatgcaagtgagatggtgcaggatcctttgcaagcgtgcctctttcgagattcaagtgcagatcagcttttgaaaggaaagagattgtgctcctgcttctcacagaaatggtgtttttttcctccagttggtacaatgcagatgagaatactagcatgtacggcacaacactccctgtacaacagtcagggtgttctcttagcggaaggaaaggaagcgaattgaaaaccagctttgggtctctgaatagacagttagtgctttaactgttcagaggaaaacagaagccctgtgtgggaaggatatgactttggggtgggagaaacagaaaagagtgggaagagaagacaggaagggaaaggatgggagtgagagaagatgataggctggtgccacaggttctgttgactgacattgaatcctgggaagagggaatctcagctgaggaaaaactgcagtcagaaggccaggggacatgtctgtgggcattctaactccccgcctccccaagtttatagggatgtggcagggatccagtacctctgattctactgggcactgaggcagcattatgtatccacataacatcacagagttcttagtaaatatagttctactgactcctggttcttcacggggctccaaagttagacataaatataagcagttctctctattgctctcatgttggcttgctcctttacacacacacacacacaaacacacacacacacacacacacacacacacacacacacagagagagagagagagagagagagagagagagagagagagagcatataaaaccatcgttgctcaggaaggctacagagaaaagcactttacaatattaggtcattataaagttcagctttgatgccagtggggggggggaaatgaaattgcaacaaagtattgcattcgactctcaaacggtcatgcgtagtctctgtgggttgtaagacaaagaaaggcacgtccatgctttcaagttatttcagtctccaaagacagagaagccaacgattagccattatggaatgcaatgtcttctatatgtggcacacatgctgagagaccagatgacactacctggaaacggtttcacagaggattcaaaaggctgaggtgtgagtgtgccaggcgggctgggggacgacagtgtgttcaacagcgcgtgcaaaggctgtcaaagggaggatcactgtgattttaaaggtcaaggcagttgactaactcccgtgtagttagtgaacacgggtataaggatatctagataggcaaggcaaggcagaattaatttggaggccacctgtactgatctgaagagtttgtttgaacttcattcatctaaaatgctaaaggcattaaaaaaaaaaaaaaaaaaagcagtagcaaccaaccttagggggtggggtgggggaagaaggaactgcgtgaaggccattgagaaatcacagctttcagttaggtgtgagacttcctaaatggatccggaagcaggagctgggcacccagatcccagaaggacatttcagatttccagggacgtcttgtgaggactcagctttattcaggacgctttgaatttccttgcgtgagggacacctggcaacactcgcttgcaatggatctctgtttctaagaagcaacttgcttaactcgccattaggttttggttttgctctgaagctgaggccgaggcatttgtaggagggcctgtgctcaacaggaagccatttgcaacaccacaatgaacaaatgcttacccgaacaggcgaggaattattagagcatcacccaaactttgttttcccattaacaagctatgtgtctgaatcctcttagcaaacacggaaaaggctaagatttcagactctctgtggctctgaaaccaaacattatccccaggcccgagggaaaggcatttagacagacgctccagccccgctcgccaaattgcttgtaagtagacaggtgatgttgaatgtcagctgggaacgaaatgacttactataaactccaggcatctctcacttcgctctcaggaaatgtaacttgtatcatatttctcttcctggaagctgttcagcaagacggaggcctcagtgatactggtaaatacggaagttctttataaaccctgcctcacacttattcagaatggaagagttaatttggaaccctgttcctgatatttaaaaatagaatctttttccatgtggccatccatttgaaaagaaaaataaataaacaaatgtcagtcttgttaaatatgatctggaaagcttgcattaggtctactgaaatagcactttttaaaaggcagctttactttaggctccgggatctgaaactggctggagagttagccttgggagcactgtctgtctataatcgacaattacgccttttgtatatgtcactgtttggacgtaaagtacgcttgatttggggaatataatgtacaaaatgaagttttattgaaaaattatggtcccctggtttgtttttgttttttgttttgttttgttttgttttatttatttatttatttatttatttatttatttatttatttttatgagcaccgaaaatttgaaaacatgcaaatctttcttttttttttttcttcctgtcttcccccttgcctcacatctttttattacacagtgaggaaagaggagagaaggaaatagcaagtaggagtttctttttcttacaaatctcttattctgcagtttgatttaatccttgactttgtgtgtgagacagagatgctgtctgccccactgtgggctgtgatttccttagggatacagaaaaccacaccagcttgacctttctatacaataaaattacttaatataccaagagaaataaatttatgtcgttcttcctgaatttgacaaatgttccgtgctcagccccctggaaaggagggaggaagtgaagtctgtccccttgagacgctcccctggtttctcattggccagagacgccttccaacttgttcagttgaaaccttccatccttgtgaaacaaggctctttacatcactacgttaactttgtgggttggtagcaacgtcagaccctggtttgggaattcagtggacgaacggaacagaatagacactgatctgcatgtgggatctctccaaagggttctcctttctatcattattcaaaatcatcatatttatgatcattccttttatgtcttaaagagctgctccccacctccccatgttctggcaatcacacagatccagcgtgtgcttggcacacttttgtagcagagagaaaatggccccccaatgcccagcagacctgccccaaagtggcttctttgttgttcctaggagtttcacagctcctaggtgggaagtatttctatctttttaaaaaaagccactaagcctttggctgttatcaccaagacctacagctaactgagccctgctctttggactgtgttcaacatgtttcttgtttcttcatcaggaactcactatcctgtgaaaacccaaaccaactctctgttcagataacccaagctccagacattgcttccacatgaggaagggcagggggaaaggaattatgtttatccttttttaaagaaaagaattattcatctttttagttaggtatcattctattagttttctccctaaggtgttaaaatctcaacctagtggttttcttttataagacacacaggcacttctcatgaaaactcttcagcactttttgtctcactgtggtatatatatataaataaatatatatatatatatatatatatatatatatatatatatatatattatatatttgctaactgctcttaagatcttactcctgcttgaaaactgagttaatattaaagaagtacttgtccaaaataaataactaatctctaaggtgtataagggaaatatttctgattttacctttttagtatgactgtgtgttttgtgatacttcctggtctgtgctcagataacggaacgggaaggaacttgtaattatcaactcctcggggagataccaggcacctaggatgtacaaatgtcacagtgaatattttccttggagaccaaatatgatttgtttctgttgttgctaatatcattgtgttattgtaaacattgaaatgaatcttaaattctataaaactaatattttatattaaattacacactctccaaagctcaggaaaaaaaaaacaaaacaaaaacctagagacttcttttcttcatcagaatcagaaaagattatttctaagtcaagtcaatagtgatgaggagaatcttatttgtagccaagaggaagcaagcaacttgatatcctggaaaaaactgaccttggaataaaaagccactagttcaagtcccctcatgatctctccttggcagagagtcagaagggtagtcatttaaggtatgtggctttggtttgtcacttaggaattgaggaagttgatgtaaattactgtcaagatttccttaagctgtaagagtacagtatatgtttcatatgttttcatagttcatgtttcatagttattatgactgcaagaatttttttggaggaatactactgaataattttttgttaaaatcttcttggagcatctggtaatgttttctctacagtggtcatgaatctctgtggaggtcttacatttctcattggaagtgaccatcggatgggttggccttggttgtttgtttgttgttgcttggatttttgatgaaacttcagtgtcacctggtccttagttgttcctgccattttactgttggttagactgtagcgcagtttctcaaggtttaagcaagggagcatagatgttatggtcattgagtccatggggcaggatcacaggtgttgtgggtttctgcaaatgttgcaggttattgttccagtggttgtttaacaggaacaagctggccacagccctgttttcatggaaaccattttatggtagttgggaataggcaataaatgtgtaagacatctgaaatcatagacgactggaaaaaatagggcaaggtggtgtgttaggcagtgactggagctatggcaactttcagcttcttagaggatatgacatttgaacagaagagacatgaatgaggaagagagtttgtgtaaatgcaaagtctggaagcaaattctggaaagaaagccccatgagaaggcacagaagacaacaggcaaaggcttcaatgaccacaatgtattcaaagagtcataatccaggttactgtgactaaccatggctgcctcacagaacctggtgtagaggacaatgtttcagaagcaggactgagtcagttctgggccagcatcagaaatgtgcccttcacgctaaaaacttgaagacatgctctaaaagttttatgtaacagaggtatcttgtctgatttttaaagtttattctagctaccaagtgcaagccagactgaaaaagggaggggagtatataatcatgatagtgtaacaagaatccattggaaagatgtcgaccacatggactcaggcaaggatcgtgcagatggagaagagagcattgaactgcagtctgttttggtggtggaagaagtaagacttgccagtggattgggttggtaatgaaggaaagacaagagttaagctgacttctagggatctgactggaacagctgggcgaatggctgtgtctctattgagttgtggaatgttgatggagggaagtgtttggcttgaaaagcaagaagttgaacaaaatggtcttcaagtagagatgcccagtaggaacacaggcatgtaagtccagccaagtttgacaaaggttatatctcccctttagcatctctctttcactctctccctcccactttttctccttctctcactccttcccttcctttccatccttcccttcctttctatttccttccctccccactttccatttcctttccttcccttccctctctccccctccctccatccctttccttctctttctttcccctcctctcccttcctttccttccctccctccatacccttctcttgcccgtctctctatccttcctggtgacattttgagtgttcagatctccgaataatggtgtgtcatttttggtctggctaactcaggggtattttggactccaaatttgctcttccttctgtgttctctactaaaatgtccttctttcatagtaatccctgtagacctcggctctgtgttttccaaagtgagaatgattattagatgacctggtaacaacatgtgactggttttccagggttgatgttgagtaaggtctagtgtcaacagagcttgtgttttataaatgcaagcattatccagggaggaagagaagcctagcagtggatattaggtgcttgggctttctgtgaaagcaatgtataataagaaagatgctggcatcttccaacactctttgaccttgtattacacctttaaatgactttggatgtacaattctatttcacagtaattaaaggtacacagtgattaaaaccattctctgtgtcttgccaagagctttcctataatgcacaaactatttaaactattatcttatttgtattttctaatggcttcaactcaattctacttagcaagaaatctcattaatcaggaagggaaaaaattcactggagaacctacttaatgtaaaatttggataagtctagtctagtctaatgttctgaacaatgaattctttcatgggtacataaaatgctatttttttaaaggcagtttcttgtcttagtgttctgttattgttgtttaattttaaatatatgatgaaaatattcactcaggtacatttttattgattttttcccatcttttctgatgcttcactgttttaaattcatatgcaaagtatgaattaaaaacttaatttttgcccaccataatagaaaaatatatttattagtttacttatcagcattcaaataacttgcctctcaacttacatatcagtacacatggcattttgtatattaggaagaggtaaaagcataatctatatcatctttctatcagctgggcctctgagagacacaagttaacttataggtcatttttaacacttagtatttttttttccaaatggaaagggttgtgggtttttttatttgttttgttttgttttgttctcttttgtttttttcatgacagggtttctctgtgtacccctggctttactggaactcactctatagaccaggctggcctcaaactcacagatccacaacactcagccaagctgtggtttttaaataaccattaataggatttatggtctttgaaaaaactgactaaatacagaaaatgcaaagataaaaataaatttttctcaattttgacaccctgagggaaacactgtaatattcagatttctagaaaatgtatcttttgctggtgtcaaccccctgctgatacaagttctaatattggacaccattttctgtcctctctggcaacttcaaggaggtgggtaccagatcctctaactcctcccctacagcttcaatccatttctttcttctgtatggttgaattgaggctgctgtgtggagatcatcagagaagagatggaaactaagagatttttgcaacactgaagtaaacaacaagttcaaagtcatttaagatgtgtaaattgtgagacttcagagatgctctggattctaccttagcagccaacacaaagggaacatcatggtagccactttcttccgcacctctgggtcattcagaataaatttaagctcactctctatgaccggtagtcatctaaattgctgattttatatctatcattaaattggcatgtgtgtgctcacacctgtccataaatatttaggtaacacaaatgaatgtgaagaacattcttataggaaatacacggtggattaaattcaaaattccattgagccctcaagtataggtgaatgttaatgcatgggaataaaattcatattgagaatattgaactagatgcaatgaatataaaataggggtgaaggcataaaatatgccatagataatttatagcatagtctatatatattcatttgcatagagcttaacaataattttcttaatgggaatatcactgaataagcaacggataggatttcttataggaaattacactccattcaaaaacattcgggctggatatcttggacatagcaagctgtcattatatctctctggtagcacacaagtaatctaatatggcctcttttataatagaaaccttggcaaggcccagagaaattattctgtaccgcatcacgtgattgcgtgtgtgtcttctaagcaagaagccaagtcggtagaggcaaatatagttcttaacgccttacttttaactatacaaatttttctttaaagcttactttctgtgaaggcgaacaaaacaaaacaagaagaatatttgtttttgcttgaaatcagcttttgaaagatgattataaatttctaaaagggaaatatgataattataaaagatcttcaaacactaagaatgcacaccagagacattgcttcactgtgtgtttcaagagtgtaattattacatattaatcatgctgattagttatttcgacacaacagaaactttaagatataaaaacattttaaactttaaaattagattataagttagtgaaagaattaggttgaatttttatgtatgaagtattaaagatttacgctaaaattaagcttacctttacctgtcttgtttcttgatcacttatttctttaacgaaaagtcatcaggtggcctgtcaaaatgctgatagcccttgtggtaaatataataaattccatgtcgaatataaattgtggtgactataataaattccatgtatttacccaataccctctgaacataccccttgagcagatctgagtggttataactgaggcccaggcaccatctgcttctgcttcccaagtactgggataacaaattcaagacatcatgcctgcctttaatgttcagattgaattcatgtcctctagcatgagtgccaaccacatcacttactgagctatctgtcctgcccttctttatttttatatcttttatttccttatgtttaaaatacatagatataaatacacatatgtatatatatcgataatcataaatcagtgtcgataggtgtaaaagtataaagatgcattctgtatgaaaacttaacaccatgtaagaaaggataaatgagtatattggagcaaagtttatatataatattatatatataattgaaagtaaattatcattaatctaaactgaagtgctgtgaatctataatgttaggtgtaatacttggaggagtcagtaagagagcaacacaagcattttaaaaaggaggaaaacggcaccatagtacaagcacttaccacaaatagtaatggaagggtaacaacccacaaaatgagtggggaacaaacagccaatgataagtataaattcaatcttattttacatgattttatataaatcttttatatatgatgctttttatctattttactcaaatggataaaaagcatcatatatctatatagtatctaaaataggcatacttactatttcaaattttagtaaaaagaattcattaaaagcaaaagaagtatgccattcaatctacattgaaatgctttaatagctatgcaaatgtaatttatcatcttataatcttagtctatcaaaaggagatagcaatgatcaataaatatgcacccaacaacaaaaccctaaaatccacaaacactgacaaggttgaagacagaaataaataatttaataaaaattatggaaaccttcaatatcaaatgtaaagattaaaagaccatgagggcaggagtgggtgggttggtgagtgggggtggggtgggggaagggatgtgggagggtgtttttaagaggggaaaccaggaaaggggataacattttaaatgtaaataaagaaaatatccaataaaaaaaaaaagaccattaggtgaaaagtctcaaggaagacatgctgcctctaggataacatggtctcatagtttctggaggacatttcctcctgaagtagcagaacatgagtgcttctcaaatatgcatggagcattgtcccgaacaggccataaaatatgctttaaaaattcaagtctttcatatacacattaagtatgtttccaaccataactggctcagattagaaagtagcaaaatatgcttcaatggaatcaatgtaaacaagcctagagatgcagttggcagtgatctagagtctgcgacattgaggcaaggtattgtaagacatctcttactataccctcatggctatgttctttgacagatcatgggataatctccaacaactaccatcttgctttattaataggaatttttaattcattttacttccagcattaggtttttcattctaaacatgtttttctgattgtagcattcttaacagtcccctaatttgaaggggggggggcttctttttgtcatcttttaaagttttacagtattctttaccagctaagaattcggccaatgttagtataattccaagtttactaattcttggtcactgcactggctttgttctgcttgtctctcactagtctggacagtatttatgaaaagtgtgattaattgtcaaaattttaaatttgaaaccttttaggtaaaactgtagccttttggcttctctggaaaatgtgaatgatctggcaacactgagtctatgatctcatatggtaccagctggctggcactaaacaacagctgtccctgtagatggactgggctctgttgcctgtagtcctcatatgtgttctctacacaaggacccatgccacttactattgttaattcaccactctgtttttcatatagaagagcaagaggcatgtgaggaagtgaatacatttttatatgcacagctatatcaaaatgggggtaggcaagatcagggccacgtttttatctgcaaagctgacaagctcagttcatttactgatttgctcacatttattatctaccctttgtggtcactactgtagttactaaggacacataggtgagggggtttggaataagcacccaaagtttacattccaaccatcctgtacacgtagtgctatatattttggtttatatgaacagcagcaacaacaaaagataacagtagtcttaagaccttcacaaagagtgaggatgtgggtacacagagggcggtgggctacctgattggaataatgttagaattcaggagtgagtggtaaggattgaaaggatggcaacgatgtagtatttggagtgttcgtttaaatagtttgctgggttaatgagaggctaccaggtcaaagggagtctgatttataaagagaaggcatatatttgcaaagcaagattacaagaccatttgaagaggacacataaaagatttgaaaggagatttgctcttgaatggaaagccacaatacgttcgagaagagaaaaagcaattgggacgtgtgcctgactgagcaacagcaaagagctggaccttcagtgttgtaggtggagaacagtaggaagaaatgaatctacctcaacagattcctgaaccatgcaggattatggggaatctgagtatgcagaatccaatgagggaagaatgtgtaggtgtgcacatatgggtttgtgtgtgggtgtgcaaacacccctgtgtgtgtgtgtgtgtgtgtgtgtgtgtgtgtgcatatgtgtcagatgagcatgagcgtataaacccccaagtgaccaacttactaccctctttatccaactacacaggaggtgggggtctcagaagctaaagaattggaaccataagcattgcagactaaggttaacaagagagtaaacacaggaatgatccaggacaccaaaaattgaggcaaaagcacaattcttatagtgattgtgagactcccacgttacgcctccctctccaagtcatttcaacacttgcagaacccttagagtcaggtgaatatcatttaccatgtgtaaaacaaaagtattctctttgggaaaaatagaatatatctagagaaataataactatatgttaacatttgaaaagtccttggagaggccacagctaatcaagctgagcagtaaagcatcccattggctcaccatgccaacaaagacagtgtttctcatcacaatcattcttcaatgggaatggctagtgcatgtaccagaaattcaatagcttcatagcttcctgaatggatcagaggagaaattattagagaaaactaacccagacaaagtagggatattcaaagatgcaggagttaaccatgtacttagaatatgaatatatatatatatatgctaatagacagtcctcgttgaaagatgtaagtctatggtcatgtgatcttacctagcatggttgatattgtctgaagaagtacacagtaagaaagaatgatgtccaatataatagcactgtcaaacccccaaatgttaccttgggataatatttagatcctaagagcttcaaggtagagagttggaaagagagggaggacattggaagcataatagaatatcaagctttcattacatgtgataagggaataacatggggcctgggatttccttcaacagtaggttttccataattatctccaaggttccatttggaagtatgcttgatgttgttgcttcaaccccacaagtacccacctttaagtcttaaatagtcccaaagagaaaagctaggcatctctggctaccatttttgttgttatgtttaactaagcatcagtacttaaaacaatacagtaattatacccagcaatttagtaaaatttcattagatacaatatctcattattagtacttacttggatggaattgatggaaacatactctctgttatcacttttagtagagctgagtataatattcaatgctactatcattaagtgcacggtgctttacttttatagtacaactacaaggttttgttgtccttaagtaatatactttcttatttgagaaaaaaataaatgaaaagcagctttaagattgcagtttcattcaacaatgcagaattctcacatccaatgaaaagaaataaacactttacccattatcttaagaaactcaaattcaggatatatggccacacttattgtgattgtttgtttgtttgtttgtttgtttccttgtgtttttaccaagaccagcatcttgacatcgagattaacatagaaggaaattggggccaatctttggcttctactatctacaaagactaatttttctagcgaagtgacaatccagctaaatcatatttaatttattgttatcatagcttactggaaatcaatattaggaattcatttgaaagacttaaatatggtaaaatctcttcagaaaatattccttgatttataatcttttaaaaaaaagttcttcctgcttttttctaccaaaaccatgaaggaagcccacttttattcttcctgattaatcactgctgttcaccccaaatcagtgaattctgagactctaccatgtactgtagccttcccacttgtttatatatccaaagctttaagaacaccatatcagattattacaaaagggggagaatgagaattaaaattacacagaaaatacagatacagttgcttccatatttctaacaacaaaaatgaataataaatcataaatctgttgggagtagctatgactgagagattacatctcacagagcctgatacttgaatttcttctctggccaccatcagtcttcctactacccttatttgttttcttcccatagtaagatatttcccaaaggccttccagaggaatacgctatagctgtcatgtttcgggtacgaagaagcaccaaaaaggaacggtggtttttatggaagattttaaaccagcagaatatggcccaggtaagctagcaattgatttgattgggtcaggtggttccctgttctgtgtacccaaatctggagaaaggtgtagtacccaaatattgtgctatttaggggaattgtcaatagaaaactgtaaatattgttaagtaggagagccttgatgatacacatgatgtgagaatctggtgaatgagaggttgatgttttgttttgtctcaaaggtttatttacttttattttatgtgcatgagtgtttgcctgtgtgtatgtatacatatacattatgtgcttgtctgatgaccagagaggtcaaaacagtgccggatccccaggaactgcaggtacattttttttgccaccaactgggtgctgagaattgaagcctgtttctctgcaagaacagtcattgcttttatcactgagccacactctaaactccaccccctttttaaacttagaggttgatattttatttgaagacagtggagctgttttccttttacagatactttattgactggcttcagttcattaattaaattcctgtcctctcatatatattattcttaaagggatttatttctttacttaaaattcctttgtcaattaaaagctgatatatcaatattggattcaccaataaaaacaaatatggaccacatgcttcatgctcaaaagtgatgagaaggaggaatttagggctgtgccaatggctcagtgtggaaagcatttgtcatgcaaaaatgtggattgggagctgggcggtggtggcgcatgcttttaatcccagcacttgggaggcagaggcaggcgaatttctgagttgaaggccagcctggtctacaaagtgagttccaggacagccagggctattcagagaaaccctgtcttgaaaaacaacaagaacaagaacaagaacaacaacaacaaatgtggattggagttcagattctcagcacaaacataagtgccaaaaggaggtgggacccacctgttagtctagccctcatgaagtggaagatgggatcgccagagcaagttagttaccaagactagtcaaatcaatgagctcttggttcaaaggcaagacctggagtgcacacacatatgtacataggtacatacacacaagcaaacatttgtgcacacaaaataaaagtaagtaaatcattaagataaaagggaaagcaagtcttctattcacacatcacatatatctaaactccaccccctttttaaacttagaggttgatattttatttgaagacagtggagctgttttccttttacagatactttattgactggcttcagttcattaattaaattaattaattaattaattaattaaattcctgtcctctcatatatattaaagggatttatttctttacttaaaattcctattttaaagtcttctatatcacatcatgtatatcatcaaggctatcctacttggggaagacatccaatggtaattggcttccgtattcttgtgcacaaatgtgcattatacctgcacacacacacaaacatacacacacacacatacacccatacacactcatacgtgtactccacatataggtacaaatatacccaagcataccacacacacatacacacatgcatacacacacatgtgtccttcacatatagggacacacacacccaagcaaaccacacacacaaacacatgccaaaagaaaatagagatttaaatagcagaattcctattcttatggagcagaaactctagtgggagaacatttatgagaacatagtgcagttatgctactgaggaatgcatgatgggagctgcctgaccataaaaaagagaggccaccaatatatacagcatggagaatccaggagtccttgcggaaatgacagtggagatgaagcagtagtgcaagcactccacagacctcaaaatacattcatgttctcttctatttcatgttctcttctatacataaccactgagcaccttcacctttggttgatctcctcgctattaatatatatcaccagcttatgatggggtgatcatttgaactgaaaaatgcatgtcatctatgaaatatcttctctttgtcatgaaagttattagaggtttaaaaggtccaggtcagttttcattcaaaatgaaatgcacataatgtttttcttctgaaattagggaccatgatatctatatatacatatagaacgatataatcatgtttaggtatgtgataatattacccagtagtataatttaaaaccatgacttttatacttcataaaatatatgcttactttatgaatacataatatatatgtaaaagaataacacatttatacacacatacactcccttatatgttctttttgtaaatgagcagaccactagaaatgcttcttgccagcatacttgaatcaaggcactaggtttttttgtatacaccaatgtagcaggcacaggtaccatcccatggttagctactgtacatatggagcatttatttgtgcactttactaattttgaacttcaattttcaagccatacgaagatgttctccttatctgtcctattttttcagatatctgtagtgattgatggtacgaagaaggtggtagaatttatgttccgaggtgctgagggagatctgttgaactatgtttttaagaatcgagaactccgtccactctttgatcgtcaatggcataaacttggcattggcgtgcaatcccgagtcctttctctctatatggattgcaatttaattgcaagtcgacacacggaagaaaagaattctgtggattttcaaggaaggacaattattgctgcacgagcttcagatggcaaacctgtggatgtaagttgtatcactaacgctaacagggagctttcaatatccctaagataaagcaaaatatcttacaacagtgactcctgggtctgagaatgtggttccatatgtagagtgcttacatagtctgcatgacacaaggggtgtcatctccaacaccagataaaccaggagtggagtggtagttcatggtgatatgtacttccaagccaagaatcagaaaggtacaggcaaaagcatcagaagttcaggtcaggaccaatctcagccacattgtgagttcagagttagtgggctacataannnnnnnnnnnnnnnnnnnnnnnnnnnnnnnnnnnnnnnnnnnnnnnnnnnnnnnnnnnnnnnnnnnnnnnnnnnnnnnnnnnnnnnnnnnnnnnnnnnnnnnnnnnnnnnnnnnnnnnnggagggagggagaaaggaggagaggaggaggagaaagggaggaagggaggggagagggagggagaggaggggagagagggagagggggagagtcaagaagggagagagggaaggagggagagaaggagagaggaagaggagggagaggagggaaggaagccatctcttcttttaatgattgcacacacaaaagacccctctctcatcaatgtttatattgttgtgtatgaagaatacttattttcgactgtatgtctcatatataactatattctactttcacccacatttttcagtcagccaattaaaaaaaaactggatcatgcctttaaaaactaagattattaagagtaacttctagtgagaaattggaaatatgacacaaagaaagtataagcttgaccaagcctttatgttttgaataaaaggattagaaaaaagatgaacttaaaatggttccagactatctgatgttttcattcaataacaatagccaattcattcaagctctctatagcaattcaactgcatttcccacaagttataatgtctttttagaattcctttgacagaaaaaataaagtcattaaatctatcagtgggtcatttggatgagaagacatggccagaaaacctctttcagatgaaaatgtcctttaaaaaacttacattttgaagctaacatgatataaatttactgttgattttcttacaaaataagaccagtaatcttctaagagtgagatctagttaaatttaatagcaaaacattttcttatgagttaaatgataagaaagtccctaaataccgtgaggagattaccaataataaatgccaaactgtaaacatgaggtgcaggcaatgaaattgcatttcagaagtaaaaccctgtgccaatatgccttgggagaggttgtccttcctaaagattgcttgggagaaaaagatgtatggatacagatacacattcaaggaaatatgattttaaagcatttttctcaaagagacactgtatgaacagatcagaagattgtctggatttggaccagagcagagcagcctgtcctagggggtccatgagggccaagggagagattgctggcttgagtcagaatcccagctggagtctgttaatgtgttagtatcttcagtgacaaaataattgcttgttgtgatagtatacggttggaactgtggtttttttttattcataatctgttctctaaaattagaacatgggggaaacaaagacaaaaacaacaacaacaaaaaaacctattgttctttgttttcaaaaccttcgagccaggagcaggactaaaatctgtcaataaatggtgggtgttacaactgatctatcattaatcataggtcacggccacttattttctatatttcatcctgttttgattctcttgtgagccattatccaccatgaaagtagcttctttgatgagggttgagaactgtactcatcatgagtacaactataaataagtagtattagattgaaatcctttaaaattgacaatctccctttagttaattaaaacaactcctaggcagtgctgagcatggtgtgacagacacatgatagcctttcagtacctggtgtgtatgtgtggtatgtttgtgtgtggtgtattcatatgtggtacaagtgtgtgagagtatagacgggtatatggtgcaggtacatgtgagggcggagcagaatagtgggtgtctgggattctttctgtgtcatttcctgcttttgaacctagatcacttagtgagccagaagcccaggttttcagataggcttgcttgacagtgagtactcgggaccacttgtctctacctccaacagctgggttatattaagacacagccatgtcaaatttttgacacaagagatgggaattcaaatcagaatatcaaaactgcagagcaaatgctcttgccactgagcaatcttgtcagcccctatttacccattattttgatagcaatgagtagaataaacttcaattataagttgcattagttaattataatcttaattctttatattatccataatttgtatcctctctctagtattttattaggctaagtattgtacttaagctcttcaaatgaaaattcatctcaatgaccttgtaaaattcctataagttatatatcaccgaatcttgaagatttttgtcttacccatagatgtgaggctgataataattccgtaagttttctagaatgtctgatgagccaaatttattttgtcactctcagtatagtgcacattagagaatacctcctggatttcatggtgtgtgtagcatgggggcaagttagagattcacagctagccagatgtctgttttctataaccacagatgaactcttacaacaccataatttgctttttctatataaaatacatatctattaacatcaaagtaatgcaaaaccaagatctattaaattgtcaataaagaaccgcagagaaagggtcaggagaaaggagggaagaaagtgggaagagagatgaatctgatcatgctatacaccaagtctaatatatacttctttgttaattgcagccctgaattcacaacagtaagctaagttcaagactccagtcaatgtttgctataatacagtgttacttaatatttcagtagtctaggagttgaagaagatgatacaaacacttatcatattgatattttatcagtaataagcaccattcaccatttcctagacaattgttctgatcttatggctatctttccattcatctcttgtctaaatgccaaaaacaggagaattttctgcagatagaagagacttttgtaaaaaaaaaaatgtgaatcctttgttttttgtgttattgagacaggattgctctgggaagtccagactggtctggaacaccacatagaacccagattagtgaagtttacactcctcatccatgctaggactgcaggcaggttctcctgggttcagcttttgagtcttgctcaggatcgtactaatataaagtccataggctttctgcagacttcattaagtacaagcaaaacctaattatcttcttttctctttattgagaatggcgcgtttacttcatacctcaaataggacccttggacctaaagagaaaccattttccttcacctactcatatctttgaccacctctgcaaagtttgacttttaaatgtaattttatacagaaccacactgtagaacacagcagtatatcgctaattaaatatttgtggggtttttgttaattcaatatttcattcttattgctcgagacagttagccaagctttgccattgtttttcattaactcatttcctctgtctaatgatcttcctctgtagctgtttctcaagtaatccttaaagcaaggaatcctaaattaaaattaaacgttataaatatgtatcagtcatttatattaattttccttttatttctatttaaattgctgtggttaataacgcctaaaattgattctcaaaaccaatgacatgtgttgctacttacttttaatagatcgaacttcaccaacttagaatctactgcaatgcaaacttcctagctgaagaatcatgttgcaacttatcacctactaaggtaggttaatttccttgccatgtgaaacacaagcagtgagatatatttcaattggcattcgtcatctgtaggttctatgtgtaggactttgtgaagcatctcagttgaaactgggtgagtaatttattctccgtatggagccattcttagaaccagctcaacacttcaaccacagggttgcacactgaaatttgatggtgatttgtgctcaggttggtctcagtgtaagaagaaccagtctttttgtttgtttttttctgagacagggtttctctgtatagctctggctgtcctggaactctctctgtagaccaggctgcccttgaactcagaaatccgcctgcctctgcctcccaagtgctgggattaaaggcgtgcaccaccactgcccggcgagaaccagtcttaatgtacaccttcctgccacccactgtacctgttgccttgtctcatctgaggccccagctgattggaggtgctgtcctgggcatcttttctccttcaaaccactgcacaggaggagtgttccatttcttgatttgtcagctacaaaatgaaaggctttcaatagggaaaaattattttttaaaaaccctcctcaaaataacatatgaaaaccaaaagtccaatattcaatgaattgtttctttggatcttaatttctccaaatttttacacttcctaagaaatctatatgaaatttttaatcagtgatttttttttcaatttaaaaacccttgtaacttctttcgtgtggtgtgtgtactagagtgaaatctagccaaataactcagagtctttcaaatattatgccttgcttatataacttggctatataaagcatatctcaaacccaatttacggatctcattccaagtaaagtgaaagtctgccaaatatctttctttaaatacctaaaaagatagctcaaatgccagtctacagacctgaaatactgaggtttcctgaacctatacctttaatcatttttcttatttcaaaagtgtattgtaaatcattatgaatgtgttatattggagttcttaaaataactattttctttcacttaaaagtaatgtaatgatgtttttatacttataagttttatattcttcttcattattcattgccttatgttaatagattactatgaaaacaggttagaatagaaatggatgaagaattggatgaagtaacaagtctgacatgacttcacacaatagtttagttcacagtgctaaccttaaattttaataaaaagataaataacaatctttacaagtattatttgaaaatcaggtttacagttgaaaataagttaagaatttagtccaagtatgtaaaaataaccaaacgatattttttatgttgatgatcatttgtgatgatcacatcaccatccattctgaaattaaaagtaactagaactctgatacatttttacaagcaggaatacataaataagataatcctaaaagccattaaatacagtggatgaagatttgaaaccaactgtcttgtatgctttttagttttgaaaactgtcttaaagggggctagagagatgtctcagtgtttaagagtgcttgttgtatagccatggtgagctgagttcttgctcatctcttagccctgatactatagtgggtgggcaaagacaaaacacccctgaggcttgcaggctgctaccctcttctaagactacaagtgtgtgtttcagggagagaccctactgcaaagaataaggtagaatatgataaaggaggacaactaaccccccattgacttctgtgggagcacacaggtacacatacctacacacatatatgcacaccacatacacataaactatacacatattgacacccacaataagtatattcataaacatataaatgtctaaatccaaaaatggcattatatctgtgcatttatagctacatattaatattaaaccgcacatgctattttcatgttaatattttatggagtacttcaaagctgaaatttattccagactatctatagacatgttccacttctaataaagtcagattttcagtctctgaaacaatcaaatgtcacatgactgagggtataaagtaaaaagtgcataggaaataataaatcattcaggagaaatgaactgtgtagcaatcttgtttcatttgaatataattctaggttattaaattgaaattttattaagataccaaatgattattaaatatagaggcgattaacatggaatctctcgtttcaaatatgagaatatggtcacagtgtgtctgggtgtgaagtttattgtgggtcttattgttactacaaatattagagtgatacctattattcaagagtcatttatgaattctatttgagaaaatgcaggaagggaataaacatcagatatgaagatgaaaataatacctaccgtgggctcacaccacagtagcaagccattgactttttatttgcataacttgaatgcagttttccactcatgtataatttgcatccagtgagtttttccatctgttgcttcatcttcactgaagcttcaaataaagagttagccatggggaacagcgtggtatgagttgtcagaacaagaagataaattggaattccctttagaatcaacatgtgatacttcctctatatttaaaaatatttattatatctctgtgtgttgatatgcttgtatgagtgcaggtatagaagagatcatcagaggttagagtaacagctggaggaggtctccagatgtagggcctgagaacaggacttgtgttctccacaaattagccctggcttttaactgctgtctctccagtctcctgcatgaaattagagggggaagattctgcctatttatagccgtgttcagcatgttctaaactcaccaggttcagaatcctccacttttacgtctttaaagaacactggattagaatagactatattgtaattagccgtcttagagtataaaataaattcatttccagcttgacttacacttaccaccagcttgctgcagtgcctatattttaccaaccaaatttatatgcttttaaacttttgtttgccatatactattcacattttgcttgtgtgaagtattttattggaagaatgtactattattgatatataatatcactatacttatcataaggccacctaatgtggctttaaaatttctcaataatcacttttcatatgctctttgtgtgtagtcaacatggttaagtacactgcaggcttagtgatagagtaaaaaatgtaataaacttttataaatggttggcaatcttggttactaagaaggaaggatggcaggcatccagacatctcagcttgatgggagctaactgcaagaactgacgtcattctctaaattctctttggggattttagtgtccagagcaagacgactttggaagtactacttcatcctgggggacctctaacactggtaaaatgtcttcatatctgccaggaaagcaggaacttaaagacacatgccagtgtattccaaacaaggtatgtgagctttcatatgtgcccactaaaaggtcactctacacagtggcctaggctccttggctgtatcctgtggtacacagaaggtgcctcatgcctagtcaaatctcagatacaatacagtcacagagaaggaccagagaaaggaaattaaatattgcaattttggatatttattttcctttcaatgtatgggagttacaattaatagaaagttgagaagaaatacatagtagggaagtgttgcacacagaacacattaggaatgggctgcagttcagaaattcagttctagatggaaagtgcctgatcttcaacatagacactcaaaaaaccagtacaagtatttctctttgctgcctagtgcctcaatttgcacagtgtctgcaaatttccatccagctgcctctttcctattaattcctattaattgattgtctctgggtggcatatccaattaatgagcttcatctgaaaacatatagttctttgatcagtgacactgggcccataggcctctaggaatatttttttatgttcatagcagtcatggaatggagtctctgtctctgtctctctctctctctccctctctctctctgtctgtctctctctctctctctctctctctctctctctctctctctctctctcattacttttgctttggagcaatgaaacagaatgattgtgacacaggcattcatttttccccctcaggaggaagcaggattaccaggaactctcagatccattggacataagggcgacaaaggagagccggtaatgtgcacacaacttgtactgttgggatgaaggagtttgctcaaatgtgatttgaaaagatgtgtccacctcatctttatgataaatgcatttcaaaaaggccctcaagaaatatgttgagatgaagatctctgtaaactagtgtcataccagcagctgagtctcttgcttaggacacaggtttaggaaatcctgagaaacctacaacagccagtgcttgtacctgtaagttccacacaacactataaagcaggcacatatcccagcgactcccagctttcctcgtcacctgcttctccagattcctaggaaacatattttccttgtctactgatgtgtcctcactgagtaggattttaatgcccaacccctactaagtatctgtgggaggacctctgctctgtgggaggcataatgctgcacatttgaagaggagtaaagaataggataaattgtttgtttcctgggatatcactcccaaagagagatagatgttataacttttagagcctatgtaagagtttgcaaaggtcctgagaaaacaatctgggcaccctaggaagaattgtgtgctcttgatctctcagtgtacaacacaggccatgactcatgcatcaagatttgtcttccttttgactaagctctaactaagctgtaatattttctagtcttttgaatgtgttttccaaccaatcaaattagggacctaatataacaaaaatcacatcagttgctggagccacagaataaaaaagcacaaggcctgttctcattgtgtgtaaagtcttgtggtgatgtaagtcaccccagaaatgacaccagtggaaagggactaagaggaattagtaaagacgacaaatgttagaaaattaataatacataaggttcataaaatattttatgcaaagatatatcttagagttgcaatgtgttgtaagactcccatcaatatgttgctttaaactatttaatttggttagaattcccatacataaaattcacagtgaaattttagtgtcatgtcaaatcaattggtatatagtttattagtaatctactacacaaaacaagtacttattgtacacttctttaattttccccctttgtgaacagtctcaaaaatctgtaaatttgattaaaccaggacagctactgctgtgtaaaactggtttcagatgaccatgaccataaacacaaccaacttttcagaaacttgtaatcaacatgaacatgtggtttcattttaagtagtgatgacattttaatatgtaaaaatgtaggctttccccggtgtttgattctggtataaaattttcatagttctaacaggtgcccagactacctgcattttggaaccatcaaatgttactttaagattgggcagattgaatagttaccattatgaaatgaccaacatttcaaagagtcactcagggagacaggtgttactacagaggcttgcatttgggtattaaatacaaggaagaatattcatggaattagcatggagtgctggaatgaaaatagccttggtgcccaaagtcttagagaatatctcttagtggctttgattcctgaatagtatccaatcaatgactgagtgtgaaagacaacactgtaacacatacaagtcacttacattatagacattcgatggatgtgtgttttcctcttctttctattcagtggggttgaaagagaggtcggactcagcctttacagggttttatgttctttcatttgtgactcgataaaacacaattcttcagttatgaggcaatgtctaacaatttccaattgattgagacgctcagtgcataaaagtttggagttagtttatgtcctttgataaataacaatattgcattaagtttctatcttcaagtatatgaatattaaattctgtgttttgtttccaatattatctggccttttctagatagtggttaccagtttatgaatgtttctttgaattttaactagatcataatggattcgaatttgtggacattagataagaagatcagaaaccatttggacatttttataatttacattttctcataaactattagatacagtttagtagcctttggtaaatttgagtttttgaaacaatgagaatgaacttgagaaaacgactttgaaacaccttttctaattatttggaagggcgatatttctataggtgttatttgaaggatctttactgtaatgtcacaaattaataaaggcaaattttcattttttatttgtggaaagctattaatagttaaataactaatcaggataaaaatgtaagcaaatccagtttcatctggtccaatgtcttctaatgactccatgtctctctgaagtcatcgcctaccctctcacatatacttcaaggcatcacatagttttgtaagattgcagctaaaaccttgctgacaaacatgcagaataatgagttacttgtgccatttttactcaggtatggcattattatcatgttggcccctcattacccaccctggcatctgtgtcccctcccaccttttctttcctttcccaaagagccccctttaaaaagctcctaaacgttaatgttcttgaacctacatgtggtctgaataatttggaaatttattttcaagtttgctttcatatcattctgcatttccatgtaaattccccaaatttgctgttcatgaaaaagttgtttagcaaatgaaatgatattgtatattcataaaatttcaagcgatagagccaagctctagtgatagaggcactcatttaaaaagtaacattacattccaccatttcaaggatagatttggtggactatttaatgatgtgggcagtatgaggaagaatctgaagcatattctttggtgcccacttaagaactcacttgggaaatgctaactccttttgatgttaacaattaatgtaccttttatgaatgtctaatgaataattcaggtgttttagtgtatagctggtggtaaagtcgaatttggcaccatgggcattcctggagaaaagatatgctgactggctatttgattaaccttagtgcctgttttatataaagctgagtcaggcaagaggggaaaatgcagaacttttatctcttggggatcagtgacccttagtccattgctagggctgccaaagatacccactggaaggttttgtaaatgaacttccagagaaatacaaactcacttgctttttctgttgttcaaggctatctttgagctacacaaacagactaaggaactgtggcagaggctacaaggccagtgatgcccaaatataaactgcacagctctgtggaaagaatgttttcctcaggaatgtaaaaaaaaaaaaaaagtctgttaacaactgggcttcttacattatcagttttatggctgatacagtaccttaatattttaattttatttaataatgttataatttatataaaattacataaatgtgtataaaatatatgtaaagttacatatatcaaatcatttattataatacagactgcattttatagcaccgtgtaagatatatgactaacaatacaagaactacatttaggtctatcaataaaaggatctgatttaatatctagataatgaaatggctgctttttcgatttctcctcaaatgccatagggttgttgtgaataattgcttccctcacaggaggttaattctgaaattcaaagtattacctggagctagcatggtggttcccaccagcaatggcagcactcatggggctgacagaggagaaaagtgaaattcgaagccagcctgggctatgctgcaagattctgtccccaaacatgaagaaaatgctaatttttttcacgcaatctttataaaatttcacatttgcgtgttaaaataattagcttatctttactatgcatattaggccaaactagttagatgtcacatgttgatgctaaagaaagactttctttaggaaagtaagtttaaggtgagcaggagagtccctccaccttgttatctttaagaccacgaccctgtggtgtcactcatatgatgctcccacaggcttaactgaggctgcttggtaggtcaggtgccgggcagcattttgtgttaatgtgtattgtcctcgttgtagttgctgttttgttatttttggtgatagtggtgatcaaacccaaggtcttgtgcatgctagacagtgctagaccactgagctctgtacacagcacttgagaccagtacttctttttttcccccccattaatttatttattcactttacattctgatctcagctctcacctcttctcccagcctccccttcacataaccatttcccccatctctcgcacccttctcctctgagaagaggaatgaaccccttatttaccaacccacctggcacatcaaatcactgcaggactaggcacatcctctcctactaaggccagacaagacagcccaacaaggggaacaagatccacaggcaggcagcagagtcagggacagcaaagactatgctgcacttctgtttcatctgtgcagtgtatggagtggtggtggctcatgtgtgctcttcggtgggttggttgtgttacaagaagaaaggcagattcttagaaaggaaggaacatacagggcaagttgaagatgcattagaggaagtcatcacgacaacagtcagtaatgaatattactgagtctctgtatttcaggtcttgtttctttccctagagcaagctcttggaggcaggatgctgaataaggtatcagtttactttgatttctctgtagccaggttcacgcaacttcagagaccccacttcatggctagtatcatcctagtacttaaagaaacacttgtctttgaccacatcctcttcccaggtggtgccagctctgctcccaaccacattatttagctgtgaaatggatttaacgctcacatgtgggaaagaattaccactcccagggtggtggcctcactcttataatccaaggtttatcacttatttaaaatcatgctaacgactacatgcaaagtaaagttaacaagaaagtcgctgttatgttattttgtggtatagctgatatatattgcaaagtatttcattctagggaagaaacatcaatcttttaaacttcaaaaattttaaatcacattgtagttagtgtttcagatagaatacttctcttgacttctaataaaaataccttatttgatttttggtgctttggatgtgagcataaactttccttaattgctgagtcatctctcccagccctgatttttataaataaatttctaaagaaaattattagttcacaaaccttatgtgattaaatgatgagagtcacatatcttcacagctcaatttcctaaatttccatccggtattttttttattctaataatttatatattttttttattcagtttacatcacaatcacagctctcctccctcctctcttcccagccccacccttacaaatccttctccccaatgaccccctcaccctgttctcctcaaagcaggggaggcccctctggggtaccaccccaccctggggcatctagtccccacaggactaggcaaggcctctcactgaggcccaaccacgcggttcaggtaggggaagcagagtccatggcagggaccagggaactgtcccattctgcttgttacggaatcccacatgaagaccaagctgggcatttgctataaatgtgtatgggtatcacaccttatgaacacgtggatgccttctgtgtcacctaaaaagcatcactgtgcttaactaagttacagccctctcagtacacatgacttgttgaaacatcttggagcaagaacacaggcaacctgccacagaacacacacctctagcacattatcctcaagtggagtgcttttatatttaagccagaagttgatttatgaacacgcaatgaggcatattctgagcagcattaagtagagtttgcatgctggcttcaatttatattcccatacaatatgatcctactgtaataaattaaattatatgcatgcaaattttattgttctaaaatagacttgcactttgacgttcggtgaaatgatagcagtaattacttttaagtgaagactctaaacagagtagtagttctccacggttgcctttttttttggcgacagaagcaaaataatatactatgtagcactgttttatgacatgtacttttggaaatggagtcatttggactttaaagaggaggaattatagcaaccaattaaattcttttacaaattaccctgtgaaccagtgcacacttagagtaggcattcaccgctgtgtacacacagcttttctgtcatccatcataagacagccactatctgcattacactgatccagcacacctacgaattttcccaggtttgataaattagctgctgtacattcatcggggaaaattccattctataaagaaatacctgtttacttctggtaaacttagacggtagtgaggagctactgccaatagaacggataagtggaatggattggtttccaggagaaatgaatgctttaatgcccagaatcacacacccacacataataacacacacgcacattcccacatacacttgcacataaacctttccaacacacacacgcacacacacacacacacacacacacacacacacgcacgcacacaccatatacacacaggtactttgtccttctcgtctgaagtgggaaatggctgaggatctgaagagtggatgaatgccctgcaaattcagctctagagtgacacttgccctaactgatgcatgtttcattcaagatttgtcatattccctacttcactgatgagccagaataatgtgcattgtttgggggcaatgtagatacttttagaaatatgattctttaccaataatatctattttaattatgtgatcataaaaaaataacaaaaatagagcctaaatcatgctaaagtaatatttacttgccgaatgactactttattccctaaggaaaatctgctttatgagacggggtgtcaccttgtagcccaaactggggtggaactcactaagcaggccaggctggcctcaaactcgggaatcctcttttctgtcagttgagtgctggtgttaaaggagtgcaccaccacgccagccaggaggaagcagttattaaactacttttcttccttatgaagtaggtagaaagccaatactagtcctcagaaatgtgcctgacaataaacaagcagagttacactgcctggatcagggttctaggacaaaaatccttctcctttatcaaatgggaattatagtggacccacgttagcctgatcttaaggacagaatgagaggtttatgagagagccaacttaatgactggcagaaatgtttaatagctagaagacacattttaaacacacagcttgatgatactcttgctctaagctctggcttactgtgagactaaatcagaactcactgaagggaatttattttattcaaaatttatttagcaggaaatgttaaaataaaactcaaatatcttcggagtgtttggcctttttaaaaacaacaacaaaattaatgttcctagaccaatggacccatccaaaagaattacacacagcatcacacgcttgtatcatgttgataaaacagctgcttaaattaatcctaggtgctaagcactgccaagaccctcctcctttccattagctaactcaatacttacagacactttagctcagatttgtttttattacttttggattaagaacctaatatataaagacaattaaaatattcctaagtttcatagctagcgaggagtggagttaggagtgaagctctgcccacgtgaactcattgttcatgtgccttcctgcagttgcatcatcaggatgctgccaagttccctgcttccttttcacactctgttagaattaaatcacaaatccattttccttgcagcttagggagcagattgggaagtccactctctagatcctgctgtgtctctttaagtctatgaacccctttaacgtaagatcttctaaccccaacacgggcagaagactatctctgaagaattactacaaattagttcattcagtaaatgagaaggttttatagttttacctccaggaacaaacagactgaaaatatgatggtttaattttttctgtttgtcaaatttgaaaagagatttgaaatactctcatagtgtccagaggtgactccagagacctgtagtctgctccccatgggccacagcccactcacgtctgctgtctgggttgacctgaacacccaacataagacattctacctttacacccattaccaaacatgcttttgatgcatggccacacatttctatacacagagtactacagagacaatagcattaaacgcacttacctggcattattaaaataacctgtaatggtaatgacacagtgggtcagttgctaatttgcctgtcgtaagaaaacagagagactgcctccagtataagaaaccttgaagacaacaaactttgtcttcataaactctgagctcccattcactgcactcaatgtgcagaaacgagactttgcactcttcattatctctgcgtttcttctcttctggggactgaaatgatgctttttgaatcttgatattttccctaaaaaggcatttatgagaacactccagctccaggaaataaaggcagatgttgtttcagtttacgtacgtgcagacgagccctgtagctgtcgtgaatcctaatgacttctgttccagcctggtccagatgtggcgttaatgcctcagagactaagaaacttataggcatttagcaaaaataatttttgtttaagtcatttggcttcctctgtgcatttctagtttcacctaatttttccatggataatcagaattaagctcatttccacagtttctccctaagttcataaaaaaagaaattaatatgtatttgcacataacaatttattattgaaactgaaaccactaaataagaacatgcaactttatccaacagtagaatttttttagatttaattacatttcttccttcctttcctccctctaagctctctcacataccctccttgctctctttaaattcatagtctcttttttattgctattgcctatatacatatgtatattcatatactgatatattcataaatgtaaactgcttagtctgtgtaatgttttcaggtatcaccatttggtattataaaataatcaatttgtgtgttcttcctcagggacaactatttctcctgctctcaacacccctcgttgcctgcagttctttctgtaggtttgagggcacatgtgctctcccctgttcactttggcatgtttgtcaccttcattcagctccctttgagtgatacatcattttgtcaaggctgataaaatatatgtggaatttatgttaacaaaaaaatcattgtttgcatttgtatcaatactgccaattataaatgtgctttctgtaagaccaagacaatgaaatctgaatgttttattttatgtttccactaaactaataacagtttgtagggttatcaaattagctatatattcaacttggactttaccaaaaaggaatcatctgaatgcctgtgtcttttaaaaaaattaataatgggggtctcatgaaatctaataattaagcaatattcatagaaaaataatcaaaaaattatagtttcattactctaccttctattcctgactaacatcccaaggctaacaggaataatcggtggaaaactctggcttgaagtggagcgtgttggcattaccttatcagtcagtgcgtactgatacaatacagctccaaataagcagaaacggaagaagcacagaggtaatagagggacaggaaaaagaaacctggccactctgcagctgactttatttctcaatggtttcttattccctcctaatgccttccactcacatcccaagtagagcagttggcagggagcacaacagatggatgacaagctcagcacatgcagcgactctggcaccaggcacttgacttttatttaccaaatagttaggcagatctcaggaacccagtctgctaacacccctatttggtttaatgtgcaatcggtatctagcacataaatatgacaatattactgggagaaaaatcactgattctttacatagttcactggctaatggtcttatttttggtatagattactaacatagtgaacagtagatttaaaaacataactgccatcatttaagaaatctgtgactgtggataacagtcttcctgaaggggctccatcagaagcatcgttcagccagccaagccaggctcaactgtaccagggtatggtgatgggtatgactatcatgtaaaaacgagagattggagttcagataattgatatcttgatctcttaccagaatcttcacaaatgactaccttcaaagctcaggcatgtttttatgaagccttctggtctaccaatcaaaactgcaagcacgtccattctcctaacttagtattttatttacatcgccaagtgtgtatgtctgtatgcttgggagcacctagaatagaaggaatcataactctcgtatctctgtgatgcctctgcttggaccaacagaggatgcccaggttgatagactcttcgcaagttcaagctgaactgcacagaactcaaggaaacttcactccaaagtacaggagagaagtaaaagagaactgttggacatctatgttgagggaagagtgagaaaggtactttagtaagtaagaactcccaaggttttatgcaaagcagacttcagggaagtagtggggaggagaatgtgtacctagcaaagcttacaagtgaggtttcctaggatgaaatgtaataggggcagtgggtacagctccagagcttgcttcccgtttccccatcacctgctctccctgcactcttttaagcaagccttactgccagtctgaagctaagttacccgatggctttagcacagtgaggctccagtagaggtaactgatacggagtcacgctatcaattactcatcacgaggaatactctggacaggaagtggtttgctgcaactggtatcttactgtccttaattgggagctgactgatggcgctgtgttctatatcttaagtcatctttcatttggtggagtgcttgctgtgggtgtcaggaactgcaggcatcagatacctcaacagatgattcagagtaaacaccttgatttcctaccgtggttttgcagtttcagaactatctacactgtctttaacctactctgacagtaggctcaaacctttctttctcacataaccttcaagaagatcatcatatcagtttcataggatcccagaattttattaaattctacaaaagtggctgggtccccctaactccactaggtattcaagaaaactttcaccacctctccaaataattcctaaattgtttatttttttttcaaagctcaaaataactgtcgttcgtctaatttggagaaaggttagaacttgatttttttctttgaagaaaaatcttagtagtgcttatacttggttacatactcaatatatgcaaatttacacatttttagaagcaaattacattaatagaaaaacaactttagcacccaaaacaacatggtgtgtgtgtgtgtgtgtgtgtgtgtgtgtgtgtgtgtgtgtgtgtgtgtgtgtatgtgtgagttatggctccatttttgttttgtttgggaccacatctgacatattatactgagttctgaaagccacattttaagagacaggtatgctcagagagcaggatcatatatttagaaactctaaactatggctaatgttttagtgaatagaagccttcatagtgacccaagtggatgtcctgcttaagatccagaagtaagaccaggaaatgatttaggttcagaaagctttgattcagtaagcatagatgtgtgtttctttcttttttttaaatttgtgcttcacaatatgaatcagacagaaaaattaattagaagcttataatagtaagctttggtggcaatggtgaatatgagactataaatgcagtttctgtattatttaatttggggagtgagtatgtgagcagtgctcatggggaggtcactggacaactttcgggagtcagttctctccttccaccatgtatgttccaggaattaaaaggcttgtaattgaaagaatgtccccagaaataagttttgaaaggtctgatttgtttggaactactgattgtatttttttccaattatgaactaaaatgttgcttggaagatagaagagaagcatcttatgttttctttaggactagaattggggggaaaggaagcaggaactcacacgcacacatgtgcacacgcacacacgtgcacacacacatgcactaaatacataaaacataaaacagatcagttccctttcaatagcattggggagtactgattttgtgggcagaaccaggtttaccctggctgccagccgttctctgggctttgctcctatatttcagaatgagcactaaagtgactggtattaccgacataatgttttagattaaatttttatagagccaacacttggcatcagcatgtttggactatgtcctcttgaagttttcatggtaattcatacacctccctcctttttgatccttggtgggagccagtatgctcactctcctctggtggactaacggcaattagaagtgattataagcctctaagtagggaaagaggcaagatcagttaacatttgccgtagcggaaacctagtacttttaactacaggaatcacagaatgtcagctaaagacacatcggtgccagcactccaggcacatggtatgtaaaagcttgcagctagctaagctatcagcactcctttttctccgaaacgggttgctggcagtgtgaataccgtgtcattgtgctttggaggattatatgtggtatctggtgatcctgagtaacttgcaatatgatataaaatattatattggatcaactgagggaaataatctgcttcttagggacaagtgggcatacttcagtgatgagtaatgttagaggctccgttaccatagaatgttctttggcatcagatactaaatgcgatttccttatctctttatcaaatgtcactgcagctttctactagtcttgccggtgcatcaggtcaagaaccatactaactttcaagagaggaaatgcttagtacactgataattatgctattttcgatgcttccacatctaattacatatctcaaccaaattttgcctgtactatgataacagcagttatactatagagtactttgatagttaaatcaacaaagaaaacccttaactcttaaaagaaagtgtgtgcatgtatctgtcaatacacttctggtgaaaaagaaaaaaaagaaacagtaaagctttccaaaaatgtattagtaataaaattaagacctcattattgaggcagagtatctcattgttgtcttaaaatgtgaagatgtggtgtttctcttcatatacttaaacttcctttaaataattgttagaaatgatatctgtgttctagataatccttaagaactgttattttctaagtgaattttctaaatattttacaaaaatagagcagatcatattttaagctgcctgaatctcgacactcaggagccagagtaaattcctagactcaagtaaacgcctgagggtccacggagaatgtatccaccctccctgaagtttctctttctgggtggtgtactattcacaaagcagacttgtcagagcgatgaccaagaattccagtaatggaacctgataggcatctgctaaaaacatttacgcccatgacaggagccagacaagtggagagggaactgtttcatgcagaattgccttggtatgcctttagaattcagatcccagtaatcaacagatatggataacgaagtaagtattttcacattgtgacaagaatatcaagatgtacgtatatatctcagattaggtaagaagatacctataaaccacaattaaattggttaccagggaccatgtagggaagccacaactgaagggctacacccccatcactgtgtaacagtctatagaagatgattatgagaatggtaactctcgatgaatttgttagcaaatcctacccaataaaagcatttactcttgtacacaaggaaaagagaaggaaggaaagaagaaagaaaatattgaaggaaggaaaaggaaggaaggagggaaaggggaacaaggaagggaggaagagaggaaggaaaaaaggaagaaaaggttagattattaaatagcatttggaacacaggatgtaaaaccattgagcacttacttgaaatgtcaggttatactacaagttggataacaataagactgatccttaacatcccagagcctccatacactcccccattcctttaccttaaaatttgaggtgattgccctgtacatgtgacatgacagaaattggaagcccagatgcacaagagatatccaggagaatgctacctttcctcatactagagggtgcccctttttgagggtcttttacagtatcatttgtgactaatgacattcattttggttactctttttagggtgaacatggcttagatggtactccaggattacctggtcaaaaggtaatgagtttttgtaaatgtttctttcaaagtaagctaataacccagattttcaaggaggattcatagaagtctttccttcttggagacccttcaaggaaacattcattacagtattagtggcatgcttccccaagaatcagtagttatgctttctaagaaccatgggcgacttagaggggcaccagaaacactttgactgttatcagtcagagtgaaaactggaaaagtatttttctgcagctgtttcctatttgcacaggttgcatttctcagattggattaagcacaagtatttataatgatctaaactttctggcattacaaggatgctatatacacaaataagctcttcaaaacaaaactttctttgctttggcctgggtagtgcagaccaatcatcctagctacacaggagacagacacaataatattacaagttcacagcctgccagcctatagtgtgagcctaaggccagcttggacaacttgataagatcacatctcaaaatgaaaagcaaaaggaaggctggaaacagttcggtgaacagttcttgcttagccagtaggaggccatgagtcaaccgcctacatgggaaaaacaaacctgcagaatgtcacattcatattcatcatgaatgagaactttaacaccatccagggtgagtctctcagtgcctgagatctttctcatcaccaaaattcatttcctctctattctttactatctattcagggattgctttctctggaagcaaacttgactgtttgtgccaagcatattgaatgcacagaaactaatacactccagattccaagagggaagtggagtaactttaggtggggccacctgtcatgatacaactcagacaatctcaccttgagggagagcatcattggtgaaatttcagatgtcccctcaatgccaaacatgacattacgttccagtgacgtgttaaccggttttaaaggcaaaatgtctgaaagcactacagagctaggttttcttatatgtagttggcaatgtcatttgaaaagatacacttctatgtatagttacagcagcttttaggaatgtttccttacatggccccttagagagaatgaggttagattgggaggcatgaaatggcatgctctgagtgtcgtcatagcagttctagaccaagcccagtgggacagcatgttctgtatcttcgagtggaggtgcaagccaagggatgtgcggatttatctgctgggaaatagttttggactttccagcagctgtttgtggtggccacatctcattctgacaatgtggctgaggcactagggacatttaacagcttcaatgtcagcttgaattaccagatggagttaaattctatactttaggggaaacactattaaaagaaaggtagtcccatgcacctatgaactaatctattgttttctgttaatgttttgaggcaaagtgaagcaaaaaagattatttacttatgtttcaaaacacacatatattttaatgtgattgtatttgtatgctaataagagctcacactcttaattaatgtagattttaattaaatcacatgccactttatggaggcattgaaaaaaaaagctgagatctgaaacttttcacctttagctacatatgctggcatatgtttatttattatcccagcaaataatagtaatggaggtaggaagatctggagttcatgaaaggccattgtgagctatatcatgagttcaaggacagcctggtctacataatatcttctctcaacaaacttaaatagaaaaataaaaggaacaaatgaaaatattggtctcttatgcctgtacactcagaagatactggctggatgccttagaccatgaccctcagtgggtgcatggcagatgtgaccatctctaccactcatctcacagctatgcagccgtagctccctggcatgtaggagactttcagcatttactaaattttttattgtaatgtgatcaacctatttatgtcaaattaaatctgaaaataaacttatgacattagaaaggaatcaggtgagcaagagatgctggtaccttctagatttgaaggacaaaatagagaatgatccctctctttgtggctgtgagttgcatgagcaggacagagagaaacctggggctgcaggcaggtggacttaggacgccaaggttcacagctaaatccacttactatgaacttctcattagatgctcattttgtggaaggtagatctcaaagaagtctgtcttctatatttaatgagatgctagtgagagcaagaatgcaaactcagtctgtgccatttaattcaattttcaaagcaaatgacgatggtagaatcctcagaagctaacttgtgggattcttggctttatgaggtgaaattttctagagggtagggaagtattcagaaagctgttcctttagtattttgcattattcagactttgttttgtttaatattggcttggagcttcacatctcaaggaactatttaagtgagtgattatttactgttagaaatatcaccattattatgaaaagtctatgaactgtaagtctgttcctattactatacaccatgctcttcatttacagggagaacaaggacttgaaggcatcaagggagaaattggtgaaaaggtattcctttccatatgcatttgtaaggatgaattatgctcctgaaatagcttcatgtgacatttagctcctaatattctataagacacatgaaataattttatagtgatgctaaaatatttgcatcacttagagtagtcttagtatattggtgattgacagaagtagttctaaacttacttagtggtcaagtttccttattaagtgtatttcatttatacgtaaaagatgcaaagatttattgagcactgtatttttatgttatggtgtcattggtccactatggctgatgactgactaaaagattcctagtatggacactggtcattggatttctttcctgggggtaggggtggggtgggattaagaaagcaaaagagccaactataacagaaaagatacactaccctaagatcagaattattccaaaagatttaatggagggacggttagaaggtatgagtgatatataagaaactcagaagactttaaagtgccttgggtcacattacataagacttgttaatgccacgacgttacagatccagagtcagagaaaagtgtggtgaaggcttcgggcaggggctgaaggaagccctttttccaaagcagtcagtcccaagtgtgaaccttgacagaagaatctcactctgccctgaactcttgttggctaagcaagcatagccagtcgggtggatgtacccatgaacatgggtaccctggggctcaaatggtggatggtagttctcgagggggcaggcacagatgtcattcctgtaactcaaggatcatcacaccatcctctcacaaaattgaactctgcattttatacctttaagcagtgttatattttataaataaataaataaataaataaataaatgctaaagacatctcgtggacctcaaaaaccatctaaacaaccattcttttacaaacttacagcttcagcaggtggggtaaatgatgtcaaactagccagtgttgcttgcttatgtttaccattcttggcagtgatcagttatttgcatcttctataagtatttatagagacaatgagcatcttccataattacaggacaaattacacacattgtaagcctcatgataattacttttcttcactgaagtgagagagagcaccatataataaccatgcaattgagtaaaaattccattaaaattacaaccgttaaaaagggtcttttagaaatctcttgaatatatatatatatacatatttatatatatatatatttgctttagaataatatgtattatcaggccatgccttttggacttatttacatgtatttttggttccttagtagtattatacttgtagaaataaataaaagtaagcaatgtataatatgctttctataatacctttaaaatttggttattttgttattctttgaatatagctgatgtttcatggtaataagtggattcccacagactgaacatgaatgaaacatattatgtgtatgcattacaatgctataataaagtccattatgtataattaatatgttaatcaaacattgagaaaaagcacatattcagtgtactttgcttctaagtcttcccttctgctttctcgtgtatattgactgtcgatccatttatctgaaaatttcatggtttagtttgttcttaacatctgactaaaattctgttgtgtatatgtctcacatttttccttatctgtccattagtgaatagacatctaggttgattgcagttcctaggtagcaatgaacatgagtatataagtatctctatattagactataacgtcctttgggtagctgtgaacagctaccactaatgatagatatgagccttgcatgtgattgagccaagtcatttatataatgaagcttatcttaaggggtggttagttctccccaaaacagttatttatcagataggattctctaagaagacaggttctcttttttaaaatttacaatgccacatgatagctcataactgtaactttagttgtagcacctgctctctggcacctgcaggcaccaagaccacatgtgttgtacataacatacatacatacatacatacatacatacatacatgtaggcaagacatccatacatagaaaggatttaaaatgaaatggaaagtttggctctgctaaacctgttgtaaaattccagacaaagaaacacagttgtatccacttactgaaggcatatttttcctgaagtgcagttggtttagatttactcatgagtgatatttattcatgagtggtcaatctctctctctctctctctctctctctctctctctctctctctcacacacacacacacacacacacacacacacacacaaaatactaaagtgaacaagattttcaaatctcttaattttaaaggtaaaaattagttctttttggagactgtttgagcctgggggtgttgagagactgcagcacccaaatcatcctccagccttgagtgtccacgatgaactggttatagggnnnnnnnnnnnnnnnnnnnngcttatgggaattgcctgtttttcactatgctgtttgttgatgttttctgctcccccaagggttaggctaataacaatgaagaagctactaaaccaacaaatgcaggctcacactctcttaaagtcactgctgaaagactagaccttgtaaacggctagtgatgtgagttttattgtcctgctgctaccagagtcgtctttacatgctgaaattccacaagatatatgtttgtaagccagaaaatcatgtttagcccactattcctctggttttataaacgctgcatggatattttttactagagagtatctgctggaaaaatacttcactgagccccatttctagttggctcccttaaatgcacactatttaattccatgaaatgtgtaacattcaaataaataaaattacaaaaatgtatttataatctagaactatatgcctaaacatacatgtacatgcatatgtacatattcactttaatatttgaaaactgtatagattcatttataattaagccatgtgttcaaacattcataatctttaaccagcaatccacatcaggcaattttcatgttatataattcaaattttcagatgccagcttcaaatggagtgtgtgtgtgtgtgtgtgtgtgtgtgtgcgcgtgtgcatgtatgtgtgtttgagtatgtgttcctattgttgattctattaatgttgagttcacttgtattagttacacacgcaggaggtttgtttctttctggtggctgcttttgatgtttcagtaggaaagacagacaaagcttaatggaaaacatctatgcacttggattggccactcacgctgggcttgcgtcaagtgaaaaggcagtattgaatccattctcgctgttctattgactagtatttgtagaaggaaattgtagcagcatcttcaggttctatgtctcacatataacaatgatatgtaaatgcaaagctagtaagtggggtgggggtgaagttggtagaattttgtccatttatatctgacagattattacatatttaatttataaccaaacttgagagatgagataatatttttataccagtaccagaaataaatatcactcgtgaataaataactcacacacttacttccaacagtatttatcatgattatacctaatcaggaaatcaatagtaattatttgcccccccctaggatctattacccagaaatcgtgatcaccttagcctattgtttatttaattcttgacatgttaaaggcacaaggaagtcgaggaactgaaaagaatccatgagctttggccacataaaattgaatgagaaaatagcacaagggtaatttatgcaatgtttattatcttttctttgggacattctacagcagaattgtaggtcactcaatgagtctctttacccaaatggagaagtccacactagctgagacattgtacatccttgtcagtgtctgctggtgtgtacaccgatggtaacggtgacgaattaacccacatcacctacattttatgtaacagaacaggagcacgtgcttccaacctacccagtagcattccaaagagaaactagattgaccacctcttgcagtacccatggcagcccgtgattggcgtaaatgttcctgtatgctgctttctagatctagatcatctctgctatgctatttgtgtgttctttaccgtaggcatttcctttataagatactcaattcctatttaacaggatagttgtaggaatttaaagtatgtgtaacaaataaaagctactctataaaaaagtgattcagcaccgggcatggtggagcaccttttaatcccagcacttgggaggcagaggcaggcagatttctgagtttgaggacagcctggtctacagagtgagttccaggactgccagtcttatacagagaaaccctgtcttgaaaaacaaaaacaaaaacaaaaaaagtgattcagcaatagccaaactatgaaacatatacaaaatattgatattttgagagaacaggcttgacacaattaatatctttagtttttaaattttcacagtgttaactcctaaatttccttgtaaacaagcaagcaaaatattcaagaatatcagctcatgtacaaaaaaattactccaaaccagtaccagtgtaagataccattgatatgtttagcatgtttttgcatgacttagcttagtgattcttcagtcacattgatcctgtctgctttgttcaggtattacttgcatgctggcatgttggctgagggtagctagtctacgctggattttaagacactgtgtctttattctagatgcacactctctttcccaaagctatcatagacttttctctaggccagggtccgaaagaaagaaagaaagaaagaaagaaagaaagaaagaaagaaagaaagaaaggaaggaaggaaggaagaaaagaaaagaaaagaaaagaaaagaaaagaaaagaaaagaaaagaaaagaaaagaaaagaaaagaaaagaaaagaaaagaaaaccaacaacaaccacaagccatttaagaccttttgaggctccttcttcagatctagctggcctcatctccacagggttctgttaaaaaaacatacaaacaaacaaacaaaaaaaaccaggtcctacacacagtctgggttcgaaaggtgtgatattgcacccacccatcttttggttgtatggatatatgcaggaatggcaagtagctagatttcataacaaatatagcacaaatgagataaaactcttatctgtaaaccagtggtttagcaaagttgcttgatttaatactttgattgttcacattctctcataacctgaagtatattagtcattcttagtggggtgtacagactatgaaaaaagtgtattttaaacttgattgatagtacagctttgtatgtaagaccattgtagaaaaaataaactcattgtagtagtgacagaaaggtgctcattaactacatcaacgaattgcgttctacttttatctaatgtcacatgcattttaattttagtcacaataaaattgttagaataaatggaaaatacacatcagaaattaattgtatttttcataattttactattaatgctgtcttggcaattatacttaatatttaatattcagaactaaggcaaggttgctaaattctgttattacagtgaggcactttgccatcatcactacaaagtgaccgtcaacctgtcaccttacttcctgtgattttcctgtagttcacctcatggagttctcctgcacattagcctgatatagaattattccatttaccctgatcatgtgcaaaacttctccaaattttagtcaggactcacgtgctccacttgacagctgacttgaagcaagaagagaacagatggggagaataactataatttcaaaaatcagagcaatttatgtgtggccgctggaaattggtatgggagcaaccatgccaactttcaattatgcacggtgataggcaattggagctcaggaatggcagtgccaagtcagaggcttaacattagtcagtgcagattgtatgttatttccctcaatcctaactgtgctgttgaataaatactaacatggagtacagttaaccttcctttactcattattaatacagaaaatggaatgttaaagaggcatgcatatacacaaataagagaatggttttcatgagcatttgtcttttcaagtattacttcctatgtccatatattgtttcactatgtgactacacattattttatttaatgattccctttttggaaataagtcttttttttttaatctgttctttgtgatgttgactaaataattttggtgtggggattgtttcattgaagactaataactatcagggacaaagtaaagagtccactcagcatcctctatagactgggatgtggagcactgtagcaatagtacatacaggagctggaggggcacttgtttactgcagaggaaaatgtttttgcatcaaaaccaaagaatgatctttgaaagaaaatattctaaacaagatatgggccaagaggaaaggatggacacactaataggaaatcagaaaaatcttatatgccctaaggactgtcaacctaaagctggtgacatctcacttttaagggatttccactaaaatctacatggtaaaactgtcaccattgttatttaacagtaccctggaattttttgagcagtgttgattttacttctaaactacgtataacagaaattaacctgtttgtttgtttgtttgtttgtttgtttgtttgttttcgtctgcctgaacaccacctaaccctaaagactcaggggtcacatcttgttctcaaatccactcttcaaaactgtggccaatgaatctttaaaaacaattgtgtggctcccatttttaaaacattcttgagtttcccactaggttgaggtccagcccttgtggcgtctgacctacactttacccctagaaccccttttcccctcgcaccccttcttgttgccttttcttctttcaattcttcgacttctccagactcttccgttttgttcttctgttgtttttgttttgtttcctgttgctgtgacaaaaacaacccggttacaaaattccaggttacagtccatcttcgtattggacatcaagacagccagaacttgaagcagccagtcatatcacatccacattcaagagcagacagcagtgaacgaatgtgacatgcctgtgctataccactcttgcctttacattaccttcaggatctcctgcatagggaatgagtccgctcaggaggggcaggtctctccacctcaatcaatgcaatcaaatgaaccctctacagacgtgcccacaagccaacttgatttagacactttctcatcgagattccgtctccagattattcagccattacactttgaaggctccttttcctgctgtcataatttttaattaaacctttaacactataactcacctgtgattacgtatcatgatttacaattagaagttcctggcatgtgattttctttttccttcatgctcatttcccctcaggcaaatagaaattctatgacagacaatatcagcctaaaattttgtttttgtctctaatacctaatataatgcttagcacataaaagaacttaattcactcattaccaccaggaataggtacacaaggcttagggtttcttttcatcttcttaaagtatttgataaatattttgatgtacggaatatcctgtttttcaaactactgctattaaacttatgaggcagagttacatgtatatagtgtccatatacataatgttacatatacacaatgtatatgcatatgcacttactctattatattaattctatatgtcttactgtaattacattgaagatataaaacattaatatattcagcagtatactaaaatatgcacatagtaaattgatttaaaataatccaacttttattatttacaaatcacatttggcaggaacaacaatctagctctgtattatatgtcaaaactatagagtgcatttaataccagatatgacactgtctcttaaatttaatggtaatattaaaagttatctaccgaatcctgtgctgtcatattgaattataatcatggcagaattgttagctgttaactgtagcgaccttaaaatgcttttattaaagaaatttattcattcattattttgcacaatttgagaacagagatatgaaaatccggggggggggactttaacaagggccaagcagaagaacctagaccttattaataggttagaaggatttggctaatctggtggtttccctcttgttttgactttcactctagtgagcccagctctttcctcaggctctgagctactcaggtttccctcctcctgctctggcttcaggttcttgctctcacatcctgtgctacagcctttgtctgccctctgctgcgtcttgctcactccagcttcttcattcttttcttgacctctaccccttcctctacacccagtttacttctcgcctttcccttacacccgtctatgagttcctcctcagatactatcatttctagcaactctaaaaagatcattttaatataaatataaatgtatgagttccttggcaagtgacttgaaagtgttttcacatcaaggaaaaggatgttattcagtcctgcccctgttaccacccctgagcttttttgcatctcagaagactgaatccagggctctgcacaagctggggagctactctatcactgaattgttcccccagttcctattcttgaacatttctgaataagatcgtgtcctgtgtgaagagtgaggtcaaggttgtctttaagttttatgacaatgttctagtatataaaagaaaactatgcgatttaagatgttttaactggaatggattaaaaattacttaatcttgtaattttctcagccagaagtatacattattgacagaatttttaggacatcccagatgctagacaggtaacccgtgtcacaaaatattagttagcaggtgcattgtttttttatttaaaagccactgtcttgtaaacttctctcataataattgtatgaacaattcacagtataacaactgctgaaaggatgtgtctcaccaaaatagcagaattcctgtgcaataggcagagacactgatgtagctgctgtactacgtgaggtgtgtgcactggctgccgtgtgaggcttataatcccggcttatgaccagccttcgcctcttactctaatatcctcaagaaactatcttcagcttctccgtgtccctgatcatcctcacaatcccctttaagccatacagctttaaataggagaggaggcttaaagaaacaagacaccgaaatctgttaatatcctcttccattttctgtccttttcttcattgtctctcactgtctgtctgatgatgatcatactgcatggtgagacacaaggacaaaaatgatacaacagcgatgcttggggcatgggtttcacagaggcttattttacatacctgcaacagtccaaccaagggggattggagcaatgcagctggtgttagctggctacattccaggagcacaatggtagggagattgcctcccacttaaggttgcttatgtgacctgatgattcatgggggtagtatcctagtaacagtgtgacaaaggcatagggtcgcaccctgtaagtgcaggttgaatcatttctttcttagttaacaggaaattagatggtcacctacattagctctcactgtttagattctgttagcccccatagaagatattattttgttgttgttctaagtcaaaatctcttattttgattatcccatctgagttctgaaaaccctttagagagttcaagacagctgcaatactttctggtacattgttaatatcttggtattgcattgtgcttcattgatatttattttttaaaaataatattttttacactccatcttccattccccacccccatctaccctctgactgctccacatcccacacctcctccccaccccacccccatgttcatgtggataccctcccccccccccacctgacctctaaactccctggggcctccagtctcttgagggttaggtgcatcatctctgaatgaacagagacctggaagtcctctactgtacatgtgttgggggcctcacatcagctgttgtatgctgtctgtttggtggtccagtgtttgagagacctcgggagtccagattaattgagactgatggtcctcctacagggtcacccttctcctcagcttctttccatcttccctaattcaacaacagggatcagaagcttctgtccattggttggatgcaaatatctgcatctgactctttcagctgcttgttgggtcttctggaaggcagtcatgctaggtccctttttgtgagtattccatagcctcagcaatagtgtcagaccttgagacctcccctgagctggatcccccactttgggcctgttgctggaccttcttttccacaggctcctatccatttccatccctgtaattcttttagtcagaaacaattatgggtcagagatgtgactgttggatggcaaccccctccctcacttgatgccctgtcttcctgctggaggtgggctctataagtttcctctccctactgttgggcatttcatctaaggtccctcccttgagtcctgggagtctcttacctcccaggtctctggtgaattatggaggtccccccaacctcctatttcctgaggttgcctgtttccattctttctgctgatgctcagggcttcagtccttttctttcacccaataccagatcaggttcccctctcccccagaatctccatcctggtccacttttcctccaaggtccctcccctctccccaattgtgattgatttcttttctctcccaagtgggactgaggtatcctcacttgaccacctcagcttggaccttattgagttctatggactgtatcttgggtattctgtacctttttttttttcctctagtatccacttatttgtgagtacataccatgcacctccttttgggtctgagttacctcactcaggatgatattatctagtttcatatatttgcatgcaaaactcaggatgtccccattcttaatagctgatagtattctattgtgtaaatgaatcacattttctgtatacaatcttctgtcgtgggacatttaggttgtttccagcttctggctatcataaatatggccactatgaacatagtggaacatatgccctgtggcatggtggggcatcttttgggtatatttccaagagtggtatatctgggtcttcaggtagatctatttccaattttctgaggaacatccagattgatttccagcgaagttgtaccagctttcaatcccaccaggaatggagaagtgttcctctttctcttacaggctccaaatacttcttgtggctgccttctaatgctgctataccacaccagatactgatgcatttcagaaatagctgtaattatttttgtatgtgtacacgtgtgtgtgcgtgtgcgtgtgcgtgtgcactaaataacccaggcagtgtaatatatgaacagagccacaattcagttccaactccagctaatttcatgaatatctcaaagtcttcacctgggaaaatagagaatgaggctgtgttgcctcatctagagtcacgagtgacctgacataaactctcaaaatatggagggattctactactgtcagtttatgatcttgaaccagaatataagcatttatatttataagtggtcacttctcttttggatctgtggtcttctagtctccttgtatgctgtttactgtgttctattacagttagcaccttttttcattttgtaatgattgtgaatttcatacacatgaattctggtgacttaagtcactgatatgagtactgaatagaaaaaggcttgccactgtctccgaatcctctttctgggaaacagccaaacatctctgaagatagtattgctgttgaaccacttttttttttaacctcactggcatttaacatatgcctctcaacggatcctttgctcaatgtctgactcaattaaagaaagtgaaatcacaacatgaaagttttgttttagagatcatcttgctccttataaattccttgaaaccactctaaaaactaattcaatccagatacctgccaaaaatcattattaaattatttttaatgtgtgtgtatttttaaaatgaggatgtatcattgtatcacagagctgcctttccttcaagattcttagaaactcgtgccagtgatagccatggactctgagttatctgtccttcatctgtgccccctagcttgatgtctgccttggtcccaggggtctcgagctacagttaattaaaaggccttcgatgtcaatgaaactcagtaagatacagaattccttcaagacacatgctgggctttcaaacatatgtgtttgttcaatcacccattcattcatttgatcattgaggacctactccagactagatactgtgttcagcattaaggtaacatgaaagggacagaacctcctctcaaggaacatgtgcgatgtgtttcaccgtggcttgtataggatcccattgaaggaagagaatggagcacacacactgtcttggatggaggtaaagttaggtcaaattttattcattagtgaatcctgaagggaaagtaagatttctctgagcaggaagagtcagatgaaagttcacaagttcagtgcaatactttttgggatgtgtagggaacctgatggagtctattgtgtgtcaaaatggaaagcggtggccattgcaagagaaataaaagctcttcagaaaataattgaagcacagcttcaggctgaatgtccaaaagatggtgaaagaagaaataccaaaataccaaaaataccaaaaataccaaaaatacaaaaaaagaaagaaagaaagaaagaaagaaagaaagaaagaaagaaagaaagaaagagagaaagaaagaccaaagaaataacatcagagggtcatttggagcatttgattcctgatgtctttagcttgctttcctcagtaaaggcaccatcagaccaccaagaaactaaccaccttggtaaggaatattttgaggggaaacttctcaagagaacgcccacctgaaggcttccagacagatgattagaggctaaaagccctttgaaagccttagggcagtattagcaggacttttgttaagctctctgtttcttctcaaaatgcataaaaactgaacagtttagtctagggaggagaacaaatctgacctgtagtataagcttattctcctaaggcaaaatctttaggcaatggtataaatccaatcaattaatcatccctttgagtaagagagagagagagagagagagagagagagagagagagagagagagagagagagagggagaaggaggaggaggaggaggaggaggaggagaggagaggagaggaggaggaggaagatgaaacatagccacttcttttatgaatcaaacacagtttggtgttggttgtcaagtgttgtggtgagttactgattttacctgatagcaagcagatacagttactcaacaataacaacaacaagacatgtaagtttcagcagtcttctggttaggtgtctagtctttaccctcagtcttgctcttctgtccgagaaacctcagggattctgtgttacctctaggaattggtcgacatgttattcacaagtttctttgctgagatttcatcttggcttttgagaagtaaaagatttcagacataactatatttagcaagttgagagggagaaagagacaaagagacacagagagagacagaggcaggaaaacagacagacagagacacagagagagggagacagggagagagaccaagggaagagaaagaccagcagaactatgggaggggtgcatgttagaacatgtaaaggaaggaagaagaacagagaaaaagactgctctaccttttatctaatacgtgttttttcaaggtgtgtgtgtgtgtgtgtgtgttcccacacatactcatatgttggcaaaggtattgaacagagcacatgtggagaccagaggccagcctttcgtgtcagcttatctcttccaccttatttgagaccatttcttcttctgtgtactagatctcctgtcccttgagtttcagaggatttttctgcctctgcatcccatctctccttaaagagtactcctatttcagatgtgttgtgtcacttctgcctttacctggttctgggagtatgaaatcaggaagtcctgtttgcacggcaagcactttaccctgtgagccacttttctagcacctaatacctttcctttgttcttttttcttttcttttttgttttttagtatttacatgacatacataaaattttatgtttcaatgacaaaaagataagattaaatgtagagactatgtttaaaaaatcccatacctagtaagaaaatgtggaaatcaagaaaatgctgattagaaaatatagcaaatgaagtaaagttcgtttaaaaaaaaaatcaatgcacaggaaaatatctacaaacccatgggggaaggcagatacaaagctacaatgagggtgcattaatacagattaaacagtgagtttaaagaatcaaatgcaaaataaaggaaaaataaaatagaaataaaaggaataaaatgaaaagaaaaatagaaacaaaagagcagctttaaaataaattagtaacaggaaattcataagcatggttggtaaaatctatgaaacgacagccataaacttgtagaaatggaaaaacacattaaagctagtttactatgtgagcaataaaatgaatgagtaaaattcaggtaaacagacagaaagtaggaaaaagaaaaaaaagacaaataaggaacagaagaggtgatcacagatagtaaatggacgaaagagtgtggggactctaacatgtaccctaaaagagcaaactggttaacccgaaggacgtgtacaaacataatcaataacacctggaaaatacgccaatgttaaaaactatggaagaaatgggagaagcagctgaaaacacaccaggggatgaaggagcaactgatgttctgagttggactttatggacccatatttaaattgtatttaaaacgttctaggacaaagaaaagatagttttcaagaagttggcatatttcaaccccacagctaatgagaaatgaactaaaactagattctattcacaagcatatatagggatgtatttaaaaaggctccagctgatagaattgaactgttcagcaaaactcagatagcacaagattaggatgcccatggagatgcctgctaaggaattaccaagtgcacttcattaaccagttaaaatattgaaactgagttgtcctattgacatagactgaagctttggataacatgaagtagtcactgttaattaaatccttaggtaataggatctaataaaatatctttactgaaatccaactgtaaatactgcttgtaaaaagataaaactactagaaattgaatatgtgaagctaatttctaaaggtaaagttttcatcgcatgaaaattaaataacatgaatttgaaaaaaaatattaatatcctcactataaagtcagttttaagaaaatttcagagaacttgttaaaaaaatacttatttataagagaagttaattcattaatagaagatatattgaaaattgatattttatccaaagtcaacatgcataaaatgataaataagtgataaagttttaaaatcaataataattaggaaaaatttgaggaaaagacagaacacttgttaacacacaccaagtatagaataaactctaaaggaatatacattgaaactactctccaaaatgacaataagttagttaaatgataaaaattaattcacaattaattaatagcaatatcaacaataaaaatagcaatttcaaatgttttcaattttttttaaaagttggatactatctcctgaattttatatgcatagttaatgaatgaacatagccatttttttaacaggggcagggggagaagagaaatgtttgtcttataagacatcatcattatggatttatttttctttataacattccgggagcattggttattaatgttggtgagatgggtgacaccgtgtgagcttattattattacaatggatggatggaaccctgtggaggttaggacaacctttcaggttctgttatttccttccaccacaggtcccatggactgagctcagctccaatcaggcttacacacaagggtctctgcccactaggataagttacctgccaaggatatcagagcactcttcatttcatcttaggcaaaggctgagaagcacatcatactaacattccataagatttctgcatcgctgtaaatattatatcacatacaggagcaagatgcagagcccagaacctgctctctctcttctatgaatgaaataacccttacgtttcaatcaagtcttctataaagactctggaagtgttgaactttttcatatgaaggataccttacttccaacaaaaataaatttcaaatggatgaaagagttaagcaaatatcaaagcagagtaagtatagtgtatttgtgaaaactaataacggggtatgcataccaaaatataaaaagaaaatatggaaaaaatgtttattgacccatataaaaattgaacatggcaaatggtacaggccattattaaccaaaatcaagtaaaattattaacatagtaatgacatttgctgtttccagaggatttttaatttttgaggcaaaaaaaaaaaaaaacaaccccaaaactgagtttttaaatgtgtaagatatatgaacaagcagtcactaaatagcaacttcacaatgttaacccagtaaagctagagcttactggtagtctgtgatgtgtaatttaaagcaattatgagaagtgacttaacacccatttggcacctgttgctgggtggaattcaagggcaaaggcgtgcccatgcactgctggcggtatgtgcagaactatattctctctgggaaagcaatttggcaacatctgttcagaaatgaaaaatgcataagccctttacctagcaatcaccatcccgagaatcctactactgtgaagaatgtcacaggcaaacggtggtgtttacggctttaagaagtagaaagctttaatgcaagtcctaatggagccagctgaattcaaccatttattaagatctgcacagttggcccacagatgtcataatataagtatcacctattatgtatacagtacaaactgtctagagagcttccttgtggggaatgcattggcgtttattgcagtgttacttgcaatggcagaaagctggaaagtcaatgttcttaacaggaaatgatttaatacattatagtatagctctattatagaatattatgaaaattatattacataatatatattattcattatgcattatacattatatatttacatttatatagacatatttatgtaatgtttaaatatataatatatatgtatatatgtttatatttatacatttgtatattatatatcttgctatataatgatacatattatatattgtatatactaatctaatacattaaataatatataatattatattatttgttatgatatacaataatttataaaatagtaacaaaaatagggttatgactacatgagtaacacaaattaatgtcatatgtaatgttgaaagacaatataaaattataaaactgtaagcatggaatgaccatttataatggccaattgttttgaaaatgaagactatatatgtgtatgtgagttttcataaataaactggaaggatatacacctcattaataaaaatttgatatcccaatgagtagatgccattttaccattgaatgtgctggagatagagttcagcaggagagtgctaagggacctgcatctgagatgcagctcagtcaaagtaaagaaaagaaaagaggtaaatagtgaggccataggaatgattcacactttatcttggaaagatgcatattatacataaattatattttagaataacggttaaattcataacaattactatgtatatttgtattatatattcatagaatataagtgttgttattcatatacaaatattacataacattttaatatctgtattagcatatatatttgtatataatattcatatatatgttttaggtactttttttaatggtacaggcgatcaaacataaggccttgctcacagtagccaagcagtctacttctgagctaaatttctttcctggaaagttttataataaaaatatagcacacaagaaatgtattgatgactggaaaccagcttagataactgctataatgatcaataataaagttgaagcacaaatatgagaacagtaatagcaatgccccagtggcagtgggacagggaagtggcagacactaaagtgattgggaatggagatgacacagaaagaaggaaatgaaggaagaagtctctaatctgatgctgtacttacttattctccatttgtgtgacaatatgacactgcacaggtaactcgcctccagtgagcattcagaaagaaacacacacgtactagctctttaaggttgtcttgggcaaatcagtatcttagaatttgtgtatgaatttccaaattaactggtcagtgtgagctctcacatacaacctgctgaaattattaaatgattagttttggtgtattgttttgttttgtttttatgtaagtcaattggaatttatcttacaatatcaaatcatccatttcacaatatgcatacttaaattttttgtcttagggtttattttttagttatgtgtatgtatgtgtgtttgtgataatgagtacatgtatggtgctgtcaatagaatccagagacactgggttccctggagttgagtgacaggcagttgtcagctgcccacagtgggtgctaggaaccaaattctgggtttctgcagaaaagaacattatctgctgtgttctaagactgtgagctgtattgctagcccaggctttctttattcttagtaatatcttgtcattttcactatagaggtaacctttgctagagttattactaggtgtctggtgtgtgtgcgtgtgtgtgtgtgtgtgtgtgtgtgtatgcccccaggtgcataagtggtgggattaatgaggatatgaaggttgtcttctttcatttctctccacttcatttttgagacaaggtctaagactttgtaggtcactgtgtgtcatagatagttccaattatttaccttgaatctgggaagacagaaccacaattgaaaaattgctttgagaagcttggcccatgagcctgtgagtatgtctgtgaagcactgtttaactgctgagagtattaactcagtaagcagagttcttttatggtctcaggttcagttttgccacctggttcctgccttgagttcctagcttggctttcttccgtggtggactgcaacctggaagccaaataatgctttactccccccagggtgcatttgttcagaacacttactcagagccactggaaagcaaactagagagagtatcatgccatagaaacaaacacttctccaattcctttcgagttcctatttcttaccactatgcaaaatagtgtatagacagaagtctttaggaaagcggtgcagtgtagatctttgccagttttctacagtcaagagggagaatttaatatttaatgttctttattcacaaggttcaaaccataaagtataccccaacacaggcctcttcggggagaattcttttcaccagcattgcaaaacttattcctttctgttgaaatcttaatagtacaaggttcaaagttacgctcagcctaagttctgcagcaggggagtgttctggtcatcacctgcatcaccacacgttctgaagtggcaagacttgcaaaggagcttaagtcacaagaactgacgagaaatggctgatgccaagcgtgaggcgatatgatctgtggtctagaacaagtggcccaaggatgacttcatcactgttacaataggaaggaaggctgaggggctgctctcatgtctcatgtagacccatttgtgagtgacctggtcaggaaaactaagactacttacaagagaatggtaagagtagaagcaggagtcacaattgtaagattcaaacaaaattcttaaatagttgagcggaagctgtaacagcgtggatcctggaactaagttccatttattatttatgaacattttcaaacgttcagcttacgttgctttgttcagaaaattgtaggaattcctttttttcaacagctcactaaaaaataaatctccctcgagagtctttgaaagtttggatcatttaaaaggcatattattaattttactgcgttaataaccattatgatctagtagtgaggataatatttatcatgggacatcttaaaatgcatattatcataaaatgcataataaggactttccacctatataaattgaagttaatagattgtaacagctcaagtgggcccagtagggtcttctgaaaacctggtttaggacctagttaaacatgcattcctttcatgtcatattttagagattttgctctacctatattcaaacttgaatatgtttgttttgtttagttgtgcaaagataaaaatagaaaaatatttttccagtacattagactacaaaagagaaaaagagattttttatggttaatcttattggttttagttttaaataacacacatagaaaaatgtctattaagagtaatagttactgtacaaaacattttatgacatattgccatgcactgagaaaatcctttttttttgcatgtcacagtgtgagaaagtatgtgtttctgtttaagctgtagttattgttaattaccaatgaatatactttaatgagaagcaccagatataaattatactcagcgtctttcataatatggcttgcagattgcctacattgaaacctcctggtccactagatcagtagcagctatatgccttagaaatttaagcagtaccctcagagatcccttcacaacaacaaaagattgaagagcagtggttacctttatctatagttatatatacacatgcaatgcagggaatacctggggttacgtctataatgaacactgcctctccctcttccaacagactatatgcttctactcactgcacagtgtatgtaacacatctataaacattaccctaggtgaaagtatcacaccaggcctagtattagttttctgcattcaaggagccatacccactttggcatgcatgagaagtcacctagctttgtgactcacactgcaaatttggacacaattatcttctacatattctcttctaagattcaggatctttggcaaactccattttgatggatcaaattaaagcataacaccaatgtccactcaagtcctgtggacgatcagtgactatctgaatcatcatgctatgcctacataaacacacaaacaaaaacacaagaagtctaaaccctgccctgtcctttcattctgcaatattcctcaaaaatggaattaaaatgtcaaattatatgatgttgaaactccctaagtattttttattctttctcatgatagaactgcatgcaatatctccaacccaattcaataaaatttgtacatttctgtggccaagacacaagactccactagggttctgtgttctcttgaaaagcttaaactctgaatcttgaactaaaatggagccatgactcatgtcacctccacagctcaggtaatatagtcagaacataaagtagaattttatgtatgaattatcaagataagatctgtttccactgtaatgttgttgttgcagactagcctttctctaatagatcccagcagaaaattagtagactaaactgtccttacagagacaaaatgaaggctaatctgaaccatttgagagtgttcttcttttgtgaaaatgcctgacatttcttagacatctctacaaacacaagaagtttactgagtactgtgttatacaatcaaaggaaataaaaaagaaatagataccagcatgtgtgcatgagaacataccattgcttagaagaaacaaccaccatcttcttctcccatggatgttgtttttgtgtgttggttctgtgtgtcaacttggcacatgctagattcatcaaagagaaaggagcctcagttgaggaaatatctccatgagatccagctgtaaggccttttctcaattagtgatcaatgagggagggccccatccattgtgagtggtctcatccagggctggtagttctgggttctataacaaagcaggctgagcaagccataagaagcaggccagtaagcagcacccctccatggcctcagcatcaactctgcctccaggttcctgccctgcttgagttcctgtcctgatttcctccaagaatgaacagtgctagggaaatataagccaaatcaaccatttcctccccaacttgtattttggccatagtgctgtttttgtttgttttattttgttttcattttgttactattattattattattattattattattgaaaacagattcttttcttatacaatacatccagaccacaagctcccctccctccactcctgccacaacccctctcccccagatatccccatcccttccccttcagaagagctcagatctccaggaaacagcaaccaaacgtgacaaaacaagacacaataagacaagacaaaagccctcacattctttgccctgttttccttcttttgagaactttctgttcaagtctccagcccatattttgagtggatcgttccttttcttgattctttttaaattttagttctttatatattctggatactaatcccctgtcagatatgtagctagtaatggtcactctctttctgtgggtttttttcttcacccagttgattgtttctttagttgtgcagaaaatttttagttttatgaagtccctcttgccaattgatgaccttaattcttagacaaatggagtctgattcagaaagtttctttctaaaactatattacttatggtgatatctatgttttcttctggcagtttcaatgtttcaagttttatgtttaggtctttgatccatttggtattttgttgttgttgtttttgcaataagatagatatgtgtctaactatcattttttattattactttttcatatattgcatgcctcatttcatcttctgagtgtggctatccagttttcccaccaccctatgttgaagttgcttctttatttccagtgtgtgtttttggtgtcttcatcaaatattaggtggctgtcttagtcagggtttcaattcctgcacaaccatcatgaccaagaagcaagttggggaggaaagggtttatttggcttacatttccatactgctgttcatcaccaaggaagtcaggactggaactcaagcaggtcaggaagcaggagctgatgcagaggccatggagagatgttccttactgacttgcttcccctggcttgctcagcctgctctcttatagaaccaagactaccagagatggtcccacccacaaagggcccacccccttgatcactaattgagaaaatgccttacagctggatctcatggaggcatttcctcaactgaagctctttctctgtgataactccagcttgtgtcaagttgacacaaaactagccagtacagtggctgagttaaattttgagtcatcagttttgtcccattggtctacatgtctagttttatgtatatgtgtgtcatattgtttttattacagtggccctagaacagtggttctcagcctataggtggcaatctctgggagctgagtgatcctctcacaagggtcactgaagaccattggaaacacagatatttatattaggattcataacaatagcaaaattacagctatgagtagcaatgaaaacacatttatggttgggggataactctaacctgaggaactgtgttaaagggtctcaacattaggaagattgagaactaatgctctatgatatcacttaagttatggaatggcaattcttctagcagcgttgattttcgttcaggatagtttggctatctggggtcttttgttgttccatatgagttttaggatcattttcatgtttgtgtgaaaagtgacaacgggattattattgggattgcattgactctgtaaagagctatggtagaatggtctttttcacaatgttattctaccaatttgtgagcatttaatgtctttccattttctaatgtctttcttatctctctcctcattttagagatactttactttcttagttaggtccttccctagatattttattttctttgaggctattgccaatgggagttctccatgatctccatctctatatgattgtccttggtgtataaactagctaagttgattctgtactctggcacatcactgaatttgtttaacatatctagaagttctcaggaaaactctttgggatctcttacataccaatatcatgtcatcttcaaataggaacagttcatcttcttctttccccatctgaatctctttaatgtcctactctttgcttattgctccagctagtgctttaagcacagttttgaagtggagtagggacacttgacatccctgacttgttcttgacctcaaagggattgtctgtttcaagctttttttatttttgataaggttggctgtgattttttttctatatagcttttattacattctctctagccctacattctaaaatgaaggtgtgactaggtttttgtcaaggtctattgagatcaccatgtgtttgtttttccttaagtgcatttatgttattacatgtgttgacttgcttgtgttgaaccagccctgcattttgaaaataaagctaactaggtcacggtgtataatctttttgatgtatatatgtagtctgtttgtaagaattttattgagtgtttttgagtctacattcatcagagatattggtttatgggtttgtgtgtgtgtgtgtgtctttatttacctgtttgaatatcaaaggggattgagagtactccttctgtttcttttcctctgtttttatttctcttttgctcttccttccttccttccttccttccttccttcctttctttctttcttttctttctttttctttctttctctttctttctctttctttctttctttctttctttctttctttctttctttctttctttctttctttctttctgccttcctgcctttctttctttctttctttctttctttcttcctttcttccttcctttctttctctctttcctttggattagtttaatgattggctgtagatatcctttgaaaatcaggtaattctgctgttaattcatccagtactgaacttttattcttaaacctagaatgctttttattattatctcaatcttatttgttacagtgtatttaggttatcacttctgcttggtttcattttagtggtttcgctgaatcattcatttcttttagatttccttgcttaaaagagtaaaaggttgacagtattctgtaatattctgaatttatttggtgtctcttgtgttgtttccctgttcattttttattctgtcaaattgactctgctttttctttggttgtgtgtgcgtgtgtgcctgcttgcacatgtgtttgggtctattttattgattttttgctcagatttttatcacttcttgacattgactgtgcctagatttggtgtgttcttcttttttcaaacttttgagttgcatcattaaaatctgtacttccccccccccccccgtgggcagtttaaaccccccttagagcaatccatccagtgtgcctcagtggttttattatgtcatgtcttcattttaattttggtccagaattttgctttctttattgatttcttctttaacatattcatcactaagtaacaagttgtttttatctccatgagtttgtatatttataacagatttttttttttgctgatttaaattttattaccttgtgatcagataggatccatggagctgtttcagtctttgtgaatttgtaaagatttgctttgtgtcccaggatgtggtctattttagaaaagcttccaggtactggtgagtagagtccatgttctttgctgtttgggtagagaattctgtagaatctgttaagtctctctgaaatatgatatcatttaatcctatgtatccacctatttcttgtctggatcacccatctgagaaagtgaggtatggagtcacctactattaatagattagttgatgctgctctgaacctttagttccagcagtagatattttgcttaatgaaattgggcacacctgagttccgtgtttataaatttagtaaagttatgtcttcttggttaactgttcccatggttagaatgaagtgtctgtgtttatctcttctgattagtttttgtctgaaatctattttgttagataccaggataacgatgtctacttgcttcctggttccatctgattggagttcttacacctatcctttgactatgaggaagttccaatctttaaagttaagatgtatttcttgggaaaaaaaaaccctacataaatggattgtggtttttaattcattcaaccagcctgtgtcttttggttggaggactgaagccactgatattcaaagtaattactgaaaaatgtgtgttagctccagttgccatgttgttgaattttggtgctagtgtgttctcaatggaattttgtgctttaataattacaaattcatattttccccacagtttcccaatcatgctcataccttcttcatcctgatatattgcttcctttgtttcctttagggttggtttggtggatataaattctgtaaggttgtttatgtcgtggaaactttctccttcaattacagcatatagttttgtgtggtatattagtctaggctgtgtgtcatggtcttttaggatgtgaaatccattgcttgaggctcttttggctttcaaagtatccattgaaaaatctgttatcctgatgtgttttcttttatatatgacttatgttttttctcttgtaactctcgctacacattctttgttatgagtacttagggttttaactacagcaatgccatggggatttctttttctggtctgtctactgacgttctgtgcatttcatgtgtctgtataggtgttctttctttggtttggggaaacttttctactgttgtattgatgaagatctggtctatgccattgacttcggattcttccccctcttctgtgcctgtaattcaaaggtttagtgttctatgtttcctggattttcctttcccatagaggtgggtttttttccccatatttctggctgcttaggtctagatcctctactttaaaggtagagttctggtgttctgtcttgcttaattagctctgcttcttaggttctcctttgagttttctagcagagttattggtcttttccactccatcttcagtgtatctctctgtctgtgtgtgtgtctgtgtgtctatgtgtgtgtgtgtgtgtgtgtgtaggggaagtgtacatgtctgtggaggtgtgattacatgcggagcctagaggacacatttaggtgtcctcctcaagtcctctccaccttatgtgtttgagaccaggtcactcgctgaagctggagtttactggttgggctaggctgactgaccagtgggccctgcaatctgccaatctatgcctcaccaactcttagaccatgcacctcacctagggctttaatattagtctttttaaatatgaggggtctgaacttggatcctctgcttgtataaatgaagcatctctcaagccaccttgaagttctttttctgggtgtaaaagtcatttatcaccaatatctcgacccattcatttagggcagcataaatggtgatatttgaactttattattctctctattttattagctttaatatttctgtaataagaaactttcttgaatcaattccccgattaccaccagttagaaagttttgttaactattttccactttatacactttttaaagctgagagttcacatctataaatagttgcccattatatttttattttttgggtttttgtataatagatctgttgtaattcattgaacttgtcctcactgataataaaattgtccccagtttggttagtaaaagaaatttcacctagtccctgagtctcgtcatcacgggccattcatctctgtgagctgcagctgttaggatggcagatcatttaggttttaatgtactgcaggggctgacttagcttttgtctgcaacataaacgctccctgagtatgaccactctcagtactttctttactcttgaactcacatggcttttaatattgaggtttcccttgcaaagtgtcacagattactcctccccaaacagcagtgttgaactcttctatctgcagtgcttagtacaaggctttgaataaaattgggatgctatcaatttgtttgattatttaacacttcacaacttaagtgggcttatcattgtagaaatgttttcaaaattcagtagaggtacccctacttgtttatcatagcgattaaatctgatttagttgaaaatgctttccattctcaactgtgtagttgagtgtgtttcttcagtcaaggtccagtgactagaattaagccacacaatttataatagcaataagataaactctttaaaacattgtatttagaaaccaattagaaagtgtaaacgtagaagaacagatgaactagtcagaggtagtataggaaaagtattcaccttttcctacatgattgaataattagctattaaagtatcatcttactcttgacataccaagagcacatttttctgtgattaaggacaccatctcattttcctatgtggcttttctagaggacctgagcaagtgtgtgtgcatctggggatgaaacagatcatagaacaaggaaatgattccgtacaaatctagcttggagaaccaatggattttggggggttccttataggaccatgggtaactcaaagacagaaagcttacaccagcgtgggagaagacgcgagaaagcttcccagtgaagggtctttcgatcttcagctgttgttcaaataagcttagggagcagctttgagtccctgtagctttctgggcttcctgagccttataaattttgttagctttttgagtctgaatgaactttcctcctcgttcttgaaggaatgtttcaatccagaggaaagaattacacagatcatagcaaggttttcaatatcatgaacttatagtaatggatgcttctgttttgacaaaaaaatgtatggtcagttcataaatacctttcccaggaggttagctcaaaataatagctaggtaatacccttagctcaagtttacagataaagaaactacagctcaggaaaaaaagtcatattttttttctatcataaaattctttatgctcagcatctagttaattctaagagagtggcaattcattttaaagatgtattagaaaatgaatgttttagaaactttcattcccaaaacagaaaatttaaaaaaaaatctgtaatgcactcatcctagttagacaagaaatgagttagggacagagaggagagcaatggctcctggacccagttgaaattggcccaggatgattatgtagaattccctggatctgtcattctgtccagacaccaggcagcagctgcagaagaccgaattgcttctctcaaatgtgtattgagtttcatttcctttccgcatcagcaaaataaaatgaaatggggaattttggaaatggtctgaaatattattgctgacatcgctgtaatttggcaatggtcggaccattacacagatgatttagcagtttggggaatttactctgcatgtggcaccaggcctgagtcagcctgacactgtcatttcaaattccaccgtttccctcgggattctctgtgatcttcatcaaagagttgtttgtgggagacctactctgtgtgtctgcccttgtgtacatctgagagctgagtcagtccacattagtagctttgtagaatgggcctttaatgtttcatttgatgtcttgtttttgcccatcatctatctcctcccgtagacatccctttggacctggctttcccccaaagcaccactctctcgttctattccactagctaggatttatggctatgctgtctccacctataaaaaccagtcacccctcccccaccccctttctgtttctctgtttttctatttctgttgtcttgctctctcatttttagaggacttgcttcttacaatttgccatttatcacctagaaactgcagttgtaagtgattggaaggggtaggctgtaatgtggagtttgctaatgtcctgcgctatcatgtttcccatggtgcactggttaactgcagcctgtcaccatgaggagttatgggaacaattctgaaaatgcctcttttgtctctattccaaatattcgggtttcaggagcctggaaattctgagacggttttactgagcatgaatgaccatcgcctagatgtatcgttcccaaaggctgattctaagagagtcttgaattttgcagtgctcgtataaatgtccactgggcagttttcctcctgcagaaattagcagagttaactgctagctatgactctggaaacaataataggctctaggttaaactgtttcttaaatggaactgtctactgtttgagtcagcaaattatcacagatctttctagatctatcgctgttgtcacttgttgttgctggctggctggctggctttcaactcaagtttgtaaatcaggctaggctcacagaggtatgcctgcctctgcctttcaagcactaggatgaaaggcctagaccaccactccagtctgttttgaatgccagtgactagagataaatttttgctagacatgcattttttgtgtttcaaataatagaccttacattttgtcttagaaatatttttgaagaaccccactgaacatgtctcttgaaagttttattctttgattatagaataggagacatctcaagaagtaggactgcaggaaggctgttggtgagctgcctcttattgagggcacctgggcaaatgctgccaaggtcgcctcaggaaagcagaagacggaggtgtggaactgtccctctgtcaaagatgacatgctaatggacaaactctcctcaccgttgatactcagagcatcagttcctctcacccctctattctgtcttgccagggtcaaattaatttattggcttcagaacaattccagagaaaggaaaccaaggaaagcggcaagggtagagttagaaaagcacattggcagcacacacaactttataagagctgcccatcagctgcagccaaaaatcaatgaaagccctaggcctgtgggcaacgggaacttacattccgatgagtttgtacttttactgaacaagtaatttgcaatagtggaagttctttgagcatggaagttacttagagtctctgacctataccaggaagtaggggtgaaaataataaccacttgtggtttctgggagaactgaatgccgtgcttgtggagctggagaaatgggtcaatggttaaggacatatgtgtgtttacttttctatcgtgaaagcgccatggccaagataacttacaaagaaagcaattagggctttagcccaattagggcttatatttcagagaattagagtccatgatggcacagcaaagccatggcggcaggaacagctgaaagctcacatccctatcccctcaggtaggagtcagtgagagacacactgggaatcttttgaaatctcccctccccctcagtgatacacctcctccatcaatgtcccacctgctaatcttcccaaaccattccaccaactggggtccaagcatttgattcatgagctgctgggggccattctcattccagctgcaatagagcatatttttgcagagggccaaagtttggttcccagcccctgtgttgagtgattcgcagctacctataattcctgccctgtgaggaccgacatctcaggcctctctgccggcacctgctctcatatgcacagacacattaaaaaaataatccgtcctgcgtaaagcacagatcctggtaggggaaatatgtgctgttacgttcctgatgatatatatagaaatgtacagcactaatgttaatagctcactgttttacatacgtttcagggttaattaatacactgtagaaaggacttggctactcaactacatgatctaaccttaacattagttttatgaaagaacagacagtagggaagtcatcggtgagaattaactcccacgtgtcctcgtaatttgattagaattgactagaattcttttggttagaattgattttgggttcccatgggtctaactttccgggtttatatttttaaagaaaattttagacattctatgtcttctaaaaaaatatttcatcgtttaaaaccgagtcaaatacaaagaaacaacctctgctcctcctgtttgctaacttcctctgatgtcaaagtgagtagagcgcttcttaaattcaagaggaaacttagaatgctacggttttgttcctgctcacttccctccagtggagagaaagaggcagctgttgcttactattttcaactttcttttgtttgagatgtactaaatatgcaacacatgaatgtatgtttttttttcttgtctggatttaaaacccaccacttcatttttctgcaaacaatgatagaatttaaaacagagaagccatcgagatcatctgcttcctgcataggacctgaccagttgattccacttaaaacaagctcgtcatctaacatctatgcacttctttggtgtttttcccctacatacttagcctgactgctagttagtatatacttctctttctaatgaacaatgaaaattctccctgttaattattttaatcaatctaccaccaaataatatttttaaatgtattctcaatttagattatattaatcttattagtctgttaatagtttatcaaacacactacgttttctcttatggatagcttgttccatgcctggggatacactctctgctcagagccctggctgcattcggctacccattcttttcatcctataacacttacaagtattatttgatcaacccagaattaagtgccagactgcacatttcatcccttctttgcattcttttattacaacatagttttggtcactgaaatgtttcatgtcatgagtctattacatagatataccatatatgcaataaatttatcaatggttttcttcattggaagcagtgttaccctctaggggatatttagaaatgtctgtaaatattcttatttgctgttatcgaggagacatggctggcttctggcctacagtgaaaagtggcccgggatgatgctaaacacccagcagtgtaggggacaccccacagtggagagctgaccagagttctgaggttagacgacccaaatgacagatagatatgtatgttggtaaagagtgaatggacctttactgtgtaccatgaagactccgacagttgcacacccttcagtaaaaaccctgaccagcctatctggctttttaaaaaaatatttgtttatacatttagtgtgtggggagatgagtgtgtgtgtacacacacatgcacacacacacatgagcacatgtatatgtgagcatgtgtttgcccatgaagaccaaagcaatcataccccctaagagctggtgttacaggcaaccatgaggtatccagtgtctcagtgctgggcacgaaactcagcattctggaagagcagccagctctctggaccaccaagctgttgctccagcccctgtgtgccttctgggacccacactgtgaacattttaagtaactttgcctctttctttgaagagatccagatgctctgcatcttggcttcataatgattttatgttttgaaacaaataaatttaatatgtttagaatgctggctttaaatcagggtgactgagttgaattagggaccttgagcatatgacctaatatctcttgcctttggtttactcctatgtaaaatgttggtgcttatagtagattattcttattttttttttaattaactcaagatcactttgaagtggtgtgctgcttctctggctttctgttacaacgcaccctcttaccctacaggattaacttcaacagactatcagctctgttcacggcagcatcacagtcaccacctcagcatcagcagcattactaccaccatcttcaccatcaccatcctctccatcaccatcctcaccaccaccatgctcatcatcatgtcaccatcactatcatcctcaccctcaccatcaccatcaccaccctcatcatcattacatcatcacaaaggcttatctctctttgcccttctttcagccagtgccaacttttctaatgtcctgtaagaatgtacaattttaactctattttgaggtgctcaaagctgaaccccagatttcacacaagttactctaggcatatgatgtgcaatagaactgaatcactggccccagagttatttcaaacttgagattatgtttgtgatcaaatacattttaaatattgatgatagtatctgtgaaattctatttgtcttcctatgccaaaaatttcactccacttttataaataactgttatccaccttataggcaaccctttttctaaatagataaatattttcttctctgtcgatgggactgttttttagaatttatttgtatgtatgtgggtcttttgctgaatgtatgccagggtaatatacacatgggcctggtacctttggaagccagaagagaatgtcagatgccctgggactagaattacagacagatttgagtttccatgtgcatacaaggaaatgaagctgagtccttggaagagcagccagggttcttaactgacaactcatctcttcagcctcgttaataggacgcttgtcattagagtctgaagatttttaaggtccctttgcacactccattagccacagcctatggtgctagacacacaactcctaagctttctgtcatgggtagtattctctgtctagaccatcactttccgggtgaatgttctgtcatgacagacaattcgtggagctcagtgaaatgatatcccttgaaatgtgtctaggacaattagaagatgattcttaaaattaggttccttcatggtttttttgttttgttttgttttgttttgctttgctttgctttgttttggatttggagcgtggaggtagagaaggcctgcatactgtttcatacaagggggggatcagaggacagctcaggagatcaattctctccctccactatgtgggatgaagttattgatctcaggtcccacaccatagtggcaagtgcccttacctactgagccatctcattggatagagaatcaatttttaacttttaaaaaagagattaatctcctgagactctggagtaactattcacctgatattttaagcttaaagtcctcactgcatttctagtctctacatgctatgaaaattgaatttgttcgttttattttacctgtgcgttatttatacttcattttattagatgccaataatcttagatcattagaactacacatatgtatttctgtttatagagtatttcactctttaaaatgttctaatttcttaaaattgggtgattaatattttttaagatttatttattttaggtatatgagtaccagaagaaggcatcaattccagtacagatggttgtgagccaccatgtggttgctgggaattgaactagaacctctagaagagcagtgagtgttcttaaccgctgagccatctctccagcccccattaatttaatatttttgcaagagaaataacaatgctcatcaaaaaaattgcaaagatataggtgaaaaaatcaccttagtgatgcaatgcagatatagtacagcctgttcataccttacacatacacaacatacactacatacacaacacattctatatcacatactcacacacactaaacacacacacacatactatatttacacactctctacactcaacacacattctatacacaacacactctatacaaaatactgaagtatgacctgaggagaaacactaatagccacaaaaatgcatcaattatcattttaatcattttactttgtttttttcccccactcttattctcaagacctgttgaaggctgatgtgcagataattagtaaatggataaacagactagcatttttaaaagaaattcaattgttaggtttgcatgatatactaataaatatatccatctttcagacagaaattgagcaaaaaatatgtcactattgttatgtatcatccaccatgatattaatgttcatcttgaacaattgtgacttaataagaacatatgtcctctgccagaagcccattattaacgggtagagcctataatgtatcgctaccatctatgccagggttttgactgacttggtcttgtgatggtaactgtcttagtcagggtttctattcctgcataaacatcatgaccaagaagcagttggggaggaaagggtttatttggcttacacttccatactgctgttcatcaccaaggaagtcaggactggaactcaaacaggtcagaaagcaggagctgatgcagaggctatggaggggtgttctttcctggcttgcttcccctggctttctcagcctgctctcttatagaaccaagactaacagcccagagatggtcccacccacaaggggcctttcccccttgatcaccaattgagaaaatgccttacagttggatctcatggaggcatttccccaactgaagctcctttctctgtgataacttcagctgtgtcaagttgacacaaaactagccagtacaattgcccccttgtcaacttgacacacaaacacatcactagtaagcctcaacccttacgttcttattcatccccaaggtctaaataactttaaacgtcccacagtctttacatattcttaaaatttcaatctctttaaaatatccatctcttttaaaatccaaagtctttttacaattaaaagtctcttaactgtgggctccactaaaatagtttcttccttcaagagggaaaatatcagggcacagtcacaatcaaaagcaaaaatcaatctccaaccttccaatgtcgaggatccaactcacaatcttctgggcttctccaagggcttggatcacatctccagccatgccctttgtagcacatgcatcgtcctctaggctccagatgcctgtactccactgctgctgctcttggtggtcatctcatggtactggcatctccaaaacactgcatgaccccttcaatctgggccgtcaattgcaactgaggctgcaccttcaccaatgccttctatggcctcagctgctctgcgtgaccccttcatgtcttcaaaaccagtatcacctgggtgacccttacacattaccaagtcccactgcagcaggagtacaaccttggctatctctggaacacagcctctttgtgctttcagaaaacacttcccagaagatgtaacctcaacgatgctggtctcttcttctttttttaaatatttctttattaggtattttcctcatttacatttccaatgctatcccaaaagtcccccataccctccccccctcccctccccaccgactcccactttttggccctggcgttcccctgtactggggcatataaagtttgcaagtctaatgggcctctctttccagtgatggccgactagaccatcttttgatacatatgcagctaaagtcaagagctccggggtactggttagttcataatgttgttgcacctatagggttgcagatccctttagctccttgggtactttctctagcttctccattgggggccctgtgatatatccaatagctgactgtgagcatccacttctgtgtttgctaggccccggcatagcctaatcaccgctaatttcttagctccaactaaccagcatcaatagtcccaataatgcaaaggttttgctttagtagtcctggtatcttgttaattacacctgattcttcagccccagctaaccagaaccacagaataatcaaactccaaaatagcaatggccctgaaaagagtctttaattttccctctgaaatttcacaagccaggcctccatcttctgcactgttctcaacataactcctacacaacatctgacagagcttttaacaacgaatggatcttctagcccaaagtccaaagtccttccacagtcctccccaaaacatggtcaggttgtcacaggaataccccactctgctggtaccaatttgtcttagtcagagtttctattcctgcacaaacatcatgaccaagaagcaagttggggaggaaagggtttatttggcttacacttccttactgctgttcatcaccaaggaagtcaagactggaactcaagcaggtctggaagcaggagctgatgcagaggtcatggagggatgttccttactggcttgctcccctggctttctcagcctgctctcttatagaaccaagactaccagcccagagatggtcccacccacaaggggcctttccctcttgatcactaattgagaaaatgccttacagttggatcacatggaggcatttcctcaactgaagctactttctctgtgataacttcagctgtgtcaagttgacacaaaactagccagtacattaactataggtgctatgtgttagtgaatgtggtaactatgtcttgtccagtgtgacaccctacagactcctctgcctccttctctttctgcctccttccccacaaagttccctaagctttggtaaggagagttgaaataaagatgtctcaattggaataagaacctagtctctttttttaaaaagaatacataatggttgagatatatacactgcacttttaaatttgttcttcaggttctactgtttagattccagtaattttatagtataaaataagcataacatgacttttgtagctacaccatagtctatttatctatgtgtaataatttattggatcgggtagctgcaccacagtccatttatcattgtgtgataatttattggattgggtccttattcctgggcatgtggaatgtttctcgtaaatacctctgtgttttctataaggtgccttaagcttttcatctggttatttccttaggatacattcttaaagtaaattcacaaggccaggtggaaggaactgatttaagagccttgatatatattgccaaattgccctccagaaagttctttcttgcttatagaagaaaagaaataatccatcttctaagtctaccctaatcatttttatgtagtattcctttgaacctttgaacttctctggttttagggctcagaattgcttatttttaaatacatgttcccccctcccagaggattagcaaactaatcactgtgtttcatatatagccaaacgatatagctctcttgatttttcttagaaaaggttttgaaatacaacatttttttttattgtttaaattatttctttccagggtgaaccaggagccaaaggagactctggtctggatggcctcaatggacaagatgtaagcctaattctcctttaaataatgttctgtttagatttttaccactgacatattctttctaatgcaattaaagctggctgtccttggcagagccagccacagtcaaacaaatggagggatggaggcagatttttacacagttattttacagccgtgttttcgtttcattactgggctctcaaggcttcatttgtctcatgaatgtcttttcttcctctttatttcttgctgacttttaaaaaaagcctcacttttcactatcaatttcttcctgcatatgttcagtagtgacctgtgttcccagctggcagtcatggttcatgtcacccatgtctccctctagagaaaggctgtgtctgtagaattgcatttatgtagagaggagaagggagaaaaggaaggctatgttctaggctcatacactcttacagaaagcaatgaccttttgaccaccccatataactgtagagtgcttcaagcttaagcatggtacagcctttaacatgtctgcaattcaaatcctgccctttcactagagagctattgctcctccttacagagtgctaccacagatcttaggctgaaatttgaacaataggctaattttccattttattttattttttatttttggaatgtacctattcaaatcaacagtcacttctttctattgaaacacagattgaactgggagcttacagttacaaccctcatcccccatttatattttcatttatatatacactgcttatatggcttaaagggccacattacctagtttacaaatcaagtctatcaaaggaaacactacctacagctctctctgtctagttgcataattcaggaagcctttgaaatccttaacatggctagaagtattctgaaattcatcttgtgtgcagtagaccttcacagcaggaaagaaggctgaaaaccaatctttgtggactgtggaggaagtaaaagagtttgtaagagacttgcttccaaaagagaaatctctcaggagtcacccccagcacaagctttgttgtaccacgcttggctttagctcctgtgtagttcccaagaatatccattcacgttgctactgggacaccaaatgtccattcacattttactgtgataccactccttcttgctcttcaccttcacaatgacttccctagactgtggtggcactagaaccagtggcttcccaccaaggagtctgtacatactctcaccgccttctcttgctacatcaggatgctgaccaatttgtttaaatgcagcatctaacctactttgatatcactgcacaatggtactccattcaatggtaagagtttgggagcaaaggcccatattttaccctacctttgccattcattgaacaaggcactatggaaagtgcacttatggggagacaagaattcctcctgaatgggatggtcctgcaggacgtaagcacaacttcagtaagaaaggtttctattcctttcatcctgtaatttcttgagactaaggaatatgccaccaagcaagaaacagcccactaattttctcagcaagtcacctgccataatgctttgatctagcatgccaaaaaagctagcagaagactgagtttcagatttctaatgaaagtagtttctgaaaaagaatgtgttcaaggccatcttcccagctaatatgactaaagaagaaagcaagctctcattacttgctcctacttcttggtcatggtttctgaatatctcgggggaaaaatcaaggaaggaaaacaccatctacatgtcaactagggaaatagtaaaatcaccctttaattctgaatggctgatggaaaagtctcattttcccactacatcatgcccctcaccactgcatttcagcacttgtgacaattcatgctgaccttgtaattacaggcatacctttcagggaatatattgtatgttaatggtgattttaaatctcactaaagctgagtcactatagggattttagcttccagaacattcagttagaatgcaagcgagcaaattcaatatactaagcttgccaccttctaagctactttctacattacagtgacttgtaatggtttaatatttccactaaatgaattcaaaaaggcctgtcttgatggctttcactgttgcatattggatttagtgtgatgtgatgacccgtataatacatctttctgtgccaactttttcaaaaaatagctagtctacttagcttagaaaaagaaagcacactgtggtccgttcttttcagctgggcactgtgggatttaggacaaggcacttctctgccatgtgagattgtctttatgtatatgtatgcatagaaatatgcatacaatagcatttaacttaaaaagaggccatgaatttgaaagagagcaaggaaaggtgtgtgggagagttgagagggaggaaaaggcaaggagaaatgtaactacattataagctctaaaaaagaaaaaggaaagcagaatatattgtgtcctcaaggttcccaagtaatatgaaatagcctttattcattgggacaacaaggctattctctctctctctctctctctctctctctctctctctctctctctgtgtgtgtgtgtgtgtgtgtctctctctctcactctgtgtgtgtgtgtgcttgtgtgtatgtgtgcttgcgtgaacttgtatgaactttgggttttaactctaaagtattaataagagtatttctactgcagtacaagtgattgctactaagcactatagaaattgcaaaaattttaaatttctataatttatccttcaaaatatcttagaatagacttgatatgtatatatatatatatatatatacatatatatatatatatatatatgtatcctattgtaaccattgaggtcagactgtctggttccaatcccagctcttccagtagctacaggtcacattactctatttttcctccttgttcctttttgtgcatgatgggaaactcagattattagtacttgcagatgtgctgggagaatcaacagagttatcatgcatgcagcagtagaagggtgctcagcacacacaagaattgtatgggcaatcattctctgttatcaaaagcttttagatgtgatgtatcatcttaatagatatctctttcattagtttccttccattcaaatgcacaagagtaggtttcagtcattcagcttagtctttatgtttattttgatctttgaaacatcctacgacaaaattactgtaactggcatttctcgaattaccacccaaatctccatacaccagtgtgatctgtactactaattataaaaactctgaaatgacaaaaccagaaagtaccatctggtgatagctgttgccattgctaagaaactacattatatcagtagatagctcaaggaattaactagtagtttaaatttttaaataaagaatatcttatactgttttatttttttaaaatgctatatatgcacagtgatttttttccaataagacctctgcagtctatttgctttatgtgacagcatccctcagcttttcttttgtctttagagaaaactttccatctcacattacacacagatacaactactatgcttcagggaatagttttactgagatccctaataatagatacccatccatgtgtcaagtttaaaatccctttcatttgatgctttgtgctttttaacttaaagttttatagattaaaaagataaaaactttcgtaggtgaatactgtgtttgcaatattgctcctccccatctctccctctcatttctcccatatcttccccaccactcctcaaattcataacctcttctataatgtttctttacacacacacacacacacacacacacacacacacacacgcacgcacgcacgcacgcacgcacgcacacgctcacatgcatgaccaactgagcccgttttacgatgttcttatgcatatgtgtttagagctgataactgctttaggactggataacccatgactgggcacatcccttgggggagcagattcctttcttacagccattgattgctgatggctcttcatcccgagatgggggtcttgtgaattttttctaatctgcactggcttgtcaacaggcgttgccattatgcaggtcttgtttaggcaaccatattgtcagggtttcatggccgcaactctgctatctagaaggcacagctcaggcattacagaccaacactcatacttctaaacatgttttatgtttttgctctgtgtcttttttcttccctcaggcactcaataacattgatagcagcaacagcatgacaggagaagaaaaatcgtacttgcaaaagtattaccgagctgcttttcagagcctattacaaacccatagccttaacattacggcactttgtcacaggggacatgagttacatggtctacttccatggccatagctgtaggagcttgatgaacacagagcttctctgctgcattttattctctatgacttaaagcacagctgttagatatctgtcaacctgagtgtgaaacaccacaaaacgccattaattaacccttacttgccctaaaaaaaaccaataaataacctttgttaagagacagcaagctactgacagtactaatcattacaacaacgattctgagcatctcttcaaaataactattgcatatacctttttttttttaaatgcaggtaccttgactacctaggacgatgcaacaaacactcttcttttcctgactccctaatgccatattgcaaagtcttgagcacatataatagatttgctggctaataacattgaagtagcttcccacttaattaaaattaaaaaaattattcccatatctatatgctttgacctctgactgaccttgacttaatatcatacatcataagatgctaccttagtgactattctacttgctgtttatatcacctgtacactttcccctgggacttttctaggagtgaaacctcgaatagcacacagtcccctgcttgcagaggtggtttcttaccatcccacctgaggcagctttctccagcatttgtctcatcacatctactgaaatgtctactgtccatctcacaagtcatacagatggcaagaatcttaactttggggaagaaaaatacctgcatttatctatctatctatctatctatctatctatctatctatctatctatctactgactgactgactgactgactgactgacttgacttaacttacttatttgtagcaaggaagactttttactcaaaacggatgtaatgggggaattgcagtaagggaggggggtcaggcgcatctccagatacaaggaggacctggttgtagttgcagacagcagcatagaggagacaatgtgggaggaattactaaagggaaatatcaagtaaggcacagttctggtctagaagaattctttgtaaagacagccaagaactagatgttaaagggaggagatgaagagcagattcagttaatactgagatttgccagagaaaaaccaattacaccatatgggccaaatttaaagtaagccttatttaatattaactactgaccaagggatggagttttgtcacgcccattccctggaatttccccactgaaaatggcctcgagccatgagtaggagtttatatggacaaatctataggccactgtacttttccatgaaactttattattttccaagaactacaactcccagcatttcaggaagttacctagtccttggggaggtggggcttagggattaatttaggggattgccattccgagaatagaagagatttgtaagctgacttagcaatacttttagataaccaagttgagcaagccaagggcaaggcattaggaagagcacccagaggagcctgatttgcatgaggtaatagaggttacttttgttatcaccttcttctcttgtgtctgatctccaaagtgatgcagaaatatagagaaaacgaaaaactcaagacaagagtaaacatgttacagtttctattagtcatgatggagaagggaaaaggattggacaaaattatttctaacatgattttcttaaactacacattataaagcaaacgggaagtacaacacagtagtcaagaacttgacagcatgaccaaggctctgggctcagtccttatcactgagaagaatggggctggagaagaagagcgtccaatgagaagctactctatcagacagagtaggtctagggtagtgagtggccacaaggtactggaaaaatatttagtggacatgtggataaatgaatgatagaaatccattcacagaaatggcatgtctccctgtgagtggttaggatattcttctgccagcttttactctcaagtatctactgtttcagaaaggaagagatagatattccaaataatattccagatacagtgtagtagattactacactttaaatattatttattaaacactaaaatgattaaaatatattaaggtatttattcatttcaaagttgtttttcaagttgaatgttttattcatcctttgttcttgttaatgtctgacatggttttcacattctgtgctacaaaattgtttcatctaattacttttattaccatggtttgtccttcaattctataatgaatacctgtaggtgctggggtgtgcattatttatttcctacaaaactcccaagaagtgatagctagatccctgtgctaggaacagcaagatgtttagacttaccatatgtaacatcactcccaaatgcacccttcccactattcttcctcccccatcccatgtgttcaaaataaaggaaggtatcctccctgctcacatgtaatcaggatgtgtccatccgactcaccttcttttttccacagagaacactttcagctgattgaaagaattgatgtggccatcaccaactaagtacctccaaacacccaagaatcaggaggatttgacatatttgaaaacacatatctgacaacttttctgtctcatgtagttccctttgatatctttataaatccaggttttaaaaaaagaaaattagaaagctgaaacatagtttcaaatggacaagcactacattttgcctccagccccgtgagtgacagaagaatgcagcctctgtagttctcctcccaataattaaatttcttgatagagacatgaacatgttttttgatgtaactcatgattttttttggcaagctctataaaggctaaatcaatgctaaatcagaggtatttacaacatccacaaatttaatccaaagaggatatttcaaggctcatatagatctaaatgatggtcccccagatggtgaattaatgtaattttagcaggatgcaaagttgcacaaatatgcaatattgaggccgagtgctggtttaacgtctctgaagcacagatacgatggagtacacagcacatggaccttaccacagtgatgccattgccggtttctgtactagaaaggaaagattgggatttgggagttcagggaagcatgaactgttttttgtttgtttgtttgtttgtttgttttttgttttttgggttttttttgtctttttttctaatactctatcagtaattgaaacttttggtgactcttccacagaaaactatttttgttatgttcttttcagggtttgaaaggtgactcgggtcctcaaggtccacctggcccaaaaggagacaaggtattgtatctacccaaaagcacacacacgcacacgcacacgcacacacgcacgcacgcacgcacacacacacacacacacacacacacacacacacacgcacacacacacacgcgcgcacgcgcacacacacacgcacacacacgcacgcacgcacacgcacgcatgcactcgcaaacacacactgcctaaagtgagtgacttcttgtagatcctatctggtgacccaaacatcctgaatatggcagaaggctgttgtgtgaaaagcttgtgagtaaggaaagccttttggttgcttcagtgtgagagactgtgtgtgcagttactcgttgacattaacacaggagtgaaacctcctgtttctcacctttgcttgacagcgtgagcgttccatcagcacattagcaaaggtgtcctgtgtcaggaaactcagccagtaacaccaagctgtcacctcttaatgatcagacaggtggcgttggtggaaaggaagctcgctctgtgcctccactttaaatcaaatgaaccatttcttgtgctttccccctgtaccgtttcataacagcattttggaagtggcctttcagtgcgcaccaaccagtattaaattcaagggttgtattgagtgccgtaattaggcaattcagatttcgtgggaattgtatatatctgcattttattcttcatgctgagagcatacagaattccttcctatcttaaatatttatctttgcactagagatgatctcacagagcaatccttagtaactgatttaagttccttaacaactgttacttgtcccaaaaagaaggaatatacaatgctatgccttagaacttaagatactaagtttaatgagaaaaagagaaaatcctagatttagcatgacaacctgatggctcatgccacagacacaaagactccatgacgttcaaggcaacaaaagcacagccagagcactcggtctccatgactacggagttctctttaagtgactagaactcctgagacagaagagcaccagggtgacacaacatgaactttggagactgtttcaaagacggtttttaaaagacatggtcttactgtgtaaccctggctggtctagaacttgcagtgtcagtgaggctggccttaaagtcacaaagatcctcttgcctctaccctgagtgctggcatttacattgtgtactaccgtacccagcattttcaaagactttttaatagtcaagatacacacacctggaaacctgtattcacgtaggtcagcaaagcatttctagtactggaaaatacagacggagggagctttctcagagctagaggcacaagtgatgccgatgcggcagagcctaggagaggatgtgggaacagctccttgcagctggaaggcatggagtggggcggagagatccacttattatttctgctgatcctcattcaaactttgtcagaaaaattatctgccttcatgacgcttcccagctgctcttttggcaaggaaccatatttggaaagataatttttttctaattttagattcatagtcaaaagaataaaaaaaatttagattattttagtttttcaaaacacactttgctattgcagaaagcatgagggcacacaaggcgatttttatatcataagccccaaagggaacatgaaacagctatcattgtgcaaaaatttttaagaaaaattctatttttatgtcctttcaaagtatgaattttctggtagggaaattgagaagggtttgggggaattggaaaacgggggaagaatatgattcaaactatatcacgaagttctcaaaaaacagataaacatgtaaaagaaaaagatttatcattttatattgtttctctccataacctcttaaataatgtacagaaaggtgctgttgttaactgcaacttttctttcatctattttagggtgatatgggacctccagggccaccagccttaactgtaagtaattctaaagaaaaaaaccaaaaatcgaaatgttccatttgctttttatactacatcatgactgagatacaatttaagtattacaggaattgatagtgaactttgaatttgcctagcaaaccttctcactttaaagatgaatttctgccctgagcaatgacatacttgacccaaagccttaggggtgttttttttttttttttaatagaagtctgtaatcagtatctacctcaagcatatttctacatccttaccatggttcataaccatgtccctgtggttgattaggcattattttttgaataaaatatatattatgagaaattgaagtagagagttccacttggcctaaaaattgtaaaagtgacactagatataatcatcccacagggaaaagctcctccccctccttctcctctccctcctcccctgcccttcctcctcctnnnnnnnnnnnnnnnnnnnntcattcccctctgttcctctcccccctcccctccccctcccctgcctcacacccagatctcagaattctctatgttgaccaggttggctttgaactcacagagacccattgaactccgcctcccaagtgctgggattagaagtgtggaccaccacactcagacaagagatacactttcacactggttgttactttgcttgcaaacctaccagagactattttcccatgatttatttataagatttgcaaatgataaaacagcaggagattcgtgataaaagttaataatgtgcacatgataggatagttgtcaggttaatatttcatcatttcttaagtatctaatcataaacatatggagtattcccatttacatacaatctactactacaaattccctacatagagcattaaagattctcatttaacttaagaaagattctaagcttaatgaaaaaggaaaaaaaaataaaatcaagtgtagcctgaggcctgtcattgatattattaatgccgtaaatgaagcatgaagtcactaatattcaaagagccatcgtgatggtagatgtctcccagttctggccatagaacaatgaaacttgaagggctgtgatcttatatgtgtgtattttacctagacttgaacaacccaaatggaatgaaagtattttctacttcaaatcattttccaactggcacttaaagaagaatacggtttcttggtatataggaaatccaagaagtgagacaaggggctttactttagaagaacaaagctcttgaaggattttattttcaaaattgaatgaagtaattttgaaagaaacttttagctttatgttttctttatttacatttcaaatgttatcccctttcctggcttcccctcagaaagccccctatacacccctccccccacctacccactaacacatccactcctgctttctggccctggcattcccctacactagggcattgagccttcacaggaccaagggcctttcctcccattgatgactgacaaggccattctctgctacatatgcagctggagccatgagtcctaccatgtgtacactttggctggtggtttagtccctgggagctctgggggggggtggtactggttagttcatattgtggttcctcctatggggatgcaaaccccttcagctcctcaggtcctttctctagctccttcattggaccctgtgttcagtccaatagtagactgtgagcatccacctttgtatttgtcaggcactggtgaagcctctcaggagacagctataaccgacttctgtcagcaagcacttgttggcatccacaaaagtgtgtgcatttggtgattgtatgtgggatggatccccaggtggggcagtctctggatggttattccatcggtctctgctccacactttgtctctatcactccttccatgggtattttgttccccattctaagaaagatagaagtatcctcactttggtcttccttcttcttgagtttcctgtggtttgtgaattatatcttgggtattccaagcttcagggctaatatccactaatcagtgagtgtgtaccatgtgtgttcttttgtgattgggttacctcactcaggattatgttttctagttccatccatttgcctaagaatttcataaattcattgtttttaatagcttggtagtactccattgtgtaaatgtaccacagggctaaaattcaatatatacaaagaactcaagaagctagactccagagaaccaaataaccctattaaaaatggagtacagaactaaacaaagaattttcaactgaggaatatcaaatggccaagaagcacttaaagaaatgttcaacattcttagtcatcagagaaatgcaaatcaaagcaactctgagattccacctcacaccagtcagaatggctaaaataaaaaactcaggtgacagcagatgctggtgaggatgtggagaaagaggaacactcctctattgctggtgggaatggaagctgtacaaccactctggaaatcactttgacagttcctcagaaaattagacatagtactacctgaagacccagctataccactcctgggcatatgcccagaagattcgtcaacgtgtccaataaggacacaggctcccctatgctcataaaggctagtgactatttcttcagctcaatcacatgtctaactacctcacttagtcacttggtttgctggttgttttcagctcctgtgtgaaagctgatagatgaactttgttcattatttcacttgaaatgaaacctgggacccatagcagccaagaaattgtacgggactctatctgtagtatgaatggttcatagcaactgattcatttcttctaaggagccccccatggtggtctctatgccagtcatccaggatgcattacagagaaaaaactaagatattttgctctgtggtgtctaaagatacgacaaatccagtctaataaaaatatattgcaatttattttataaaatgaaatcataataatatgtgcatattactatttgatataattgccacgaatttgtttccttgtgtacacagtcatcatctaaaaataagggtgtgcactaaatatttaattgatcttataatgcatgttaatattttattaattgaagtaactgatatgagtcttccaggaagccaaaatgactaaccactctgtaatatattaaacaagacaatgataaatcagagtcctaattcacagtaattctcaaaacctactttccactaaaacccattggcatgctttagaaaataccagccttgggcctccaccccaccagattttaatttaataggccgaatgtgggaccgacacattttttaggtcccacaagtagtgtatggaaaaccattgtttacagaaactggagaaacaagctttcttcctgtcccatttttttttttttttaatgagaatgttgcagtggcctggctttcatttgaagtccaactcaatgaactagtaataaagaaatatctctatcattggagaggcatactggtaaaaatcaagatagttttccctccaaaaatccccctcccccactgctccccaacccacccactcccgcttcctggccctgcattcccctatactggagcatagaaccttcacaggaccaagggcctttcctcccactggtgagtgactaggccatctattggatggagcacagggtccccaatgaaggagctagaaaaagtacccaaggacctaaaggggtttgcagccccatgggaggaacaatatgaactaaccagtacctccccccccccccagagctcccagggactaaaccaccaatcaaagaacacacatggtgggactcatggctctagctgcatatgtagcagagaatgtttctttttcttaagaaagcccacatcattgacaacttcaagacagagagtcctaaaggctacccaagcttccacagctgagctgagtaaagagtgagccggctagacacctttcctcatctaaatcatagcatttagttatcttaatggaatttaaaactttgtttaacagtgaatgcaaagaaacagtaatgaatgataatgcctttgcatgaagtttgtttgtgagtggttaagtttatttcagttatttctctatatccctgtgaatcactgttctttgaccattggtttatatttttaaaactaaagaaaaaccacactgtaagtaatccaatactgaatgtcaatccaataggtatcttttctaaatacagcaataggtatcttttctaaatacagcaagccccccgccaaaaaaaaaaaaaaaagtggctcttcctctctcagcagcaatcaaccatcagctaggtctggagtctgtcttcatccaagctaaaaaaaaatttgagataataatataatgacatcatttgccccttccctttcctctctccaaatccttccatatatacatccttgctttctttcaaaaccatgtatttttactaagtattacttttgtttcatatttttaatttccaagttctcatctgtgattgggtctcagtgaaggaagtgaataaaggataagggaagccaatttgcaaggaatagagagaaggaaagttggtgaaatgtcatgaagtacagaaccccggaagcaggctcaccagagaatctcaatcatggtgtctttccttccctgccacctcaaaaccatggactttttcccttatacaggaagccatcgaaaaccaatgtagaaaagagggctagcaagaagattgaccacaatggtgctgcagtttaaatgcagtctgtactaaatgcccttttgactgataaaaataggtcatgttcagaatccatattttgattcttttgataacatttggatctttctgtagattcaccttcacaggtcatatagacagaactccaaagggaccacatgacagggggtgggggaggggataaaaaaataaaactaaatgaacagaaaaggagttggaagaaaatgaagagacagaaagaatgaaagggaaagagagaagaagggggaaatgcaggatggatgggaggtagggagaaagaaaggaatactttggggactgaagatgtagaagtgggtagcagttacacctctgcctcgtctatctttagccataactaaagtcgacttgaattgaaaaatctgaatgatgacttttgacatcgtgtgaatcaagttgcagtcttcccagttgctggctttaaagcttttccagattatcctaataataacacattaaggaataaccttaagaacaaccctgtgaacctgggcatgaaacagtctacaaaacctcgtccaagtatctttccgaaatacaccaagctcaaagaaaagcagcttttcctccctcagcagccatcaaccatcagctaggtctagagtccctcttcctccatgctagaaaaaattgaaattataatgtcatgtcatcatttgcccccttccctcttctccctgcaaaccctcccacatatacatccttgctttctttcaaactaacggtctcttttttattaattattacatatgtgtaacatatatatacatatacatgtatgtaacatacatatatgtatatatactaattatataaatataacctgctcaaggaaagcaataagcatgctaacatggagaggggaaatctcatgaggcctctattctacacaaagaactacagacaactaagggatgatgagagtcagagaaatggtctccaccagaaaagaacacaccaattatttgtccagtatcaaatggtcaaccttgacaatgtgctagaattgcttggtaaacacagccactatggttttatgtatgtaatagccatgctatgtccagaggaccacatttcacagcacccaccaatattttccagttcttagattttttttaattaggtattttcctcaattacatttccaatgctaccccaaaagtcccccataccctcccacccactcccctacccacccattcccactttttggccctggtgttcccctgtactggggcatataaagtttgcatgtccagtgggcctctctttccagtgatggccgactaggccatcttttgatacatatgcagctagagtcaagagctccagggtactggttagttcataatgttgttgcacctatagggttgcagatctctttagctccttggatactttctctagctcctccattgggggccctgtgatatatccaatagctgactgtgatcatccacttctgtgtttgctaggccccggcatagtctcacaagagacagctatatcagggtcctttcagcaaaatcttgctagtgtatgcaatggtgtcatcgtttggaggctgattatgggatggatctctggatatggcagtctctagatggtccatcctttcgtctcagctccaaactttgtctctgtaactccttccatgggtgttttgttcccaattctaagaaggggcaaagtgtccacactttggtcttcgttcttcttcagtttcatgcatttagcaaattgtatcttatatcttgggtatcctaagtttctgggctaatatccacttatcagtgagtacatattatttgagttcttttgtgattgtgttacctcactcaggatgatgccttccaggtccatccatttgcctaggaatttcataaattcattctttttaatagctgagtagtactcaattgtgtgaatgtaccacaatttttgtatccattcctctgttgaggggcatctgggttctttccagcttctggctattttaaataaggctgctatgcagttcttagattcttactgctcttctaagacatttcctgagcctgtgaagagggttattgatacagatgtcccacctacagtcaatctcttaatctcaacattctgaacaacaatgctcctctgtattagccactacctactgcagtaacaaattgctctgatggaggttgaagaatagcaacataatatttagaaggcagtttgataacatgaccactttgaaagtcctcatcaataggcctacgaatctctattcctgggccttgactatgcttaatgaattccttcctgtagagtaggcttccaatccaatcaggggactgattggtcatctccaccaacattttactgttattgcactggtagaaacatctttgctggtaggtcaatattcagtatccagtactgggcaagactgttgctgtcttttctcacccagcagcctgcatagcatcttgaaacaccatgaaatacagccagcaggcagagtttcttgcttagttgaagactaattctgtatcctacaaccaaaatgtgtggtgtcttcaccaatagggtcttactgtctagttgaagtagataaccaaaagcaatgacaatagactccattgcttccagtgtctctgaggcctctctggccaaaaatttatagggaaataactgctactcactgaacaaaggaggttctgtggccaagtatgagagcagtagaactctatggctataaatcaatatttaataagcagtttgacaacacgaccatttagaaaacaataataataggctcttattcatggcctgggatctctccaggaattggctcttgtccaggttaaaataataggcataaattctctcctgtttaatgaagactatggaacataatggacactgcatttattatttaatgtaaacaagtgttaataacttatattattgccttagatgtttttaaacaaagaaaatatcattagatgtctacttttctcttttcattctaaagaaattataaaagaataatgactcctgattactacatgtctatgttatagacatgtacttaagatcatgttagactacaccttttcatacatggtattttcctggaataagtatttgctgtatgctattccttattagcttttgagctctgtccatgtggatgttatagattatatttatacttttcaaccgacttatcttcttctaataggcaaaagctttcccaccaataagtatagaaaaatgtttctgttgctgacattttcctgtactaacaatgtacaatgcatcaatttgtgcctatctttcatgaacatgggtgttttcttggttatatgcatataagtaaatccattgcatgataaagaatgtcttttgtccaatgtaataatatagtgtctaatttccctctccaatgtagcgatatgaattattggcctctttgtcaatttataagaattataaaggcaactacatcttaacaatatttagcatcgttaaatgttttagtttaagcattttcaaagccctaaaacacattcaaatgcttatggggtttggggatataatatggaaaacattacaaatcaacaagagaaagagcagaccactccaaatattatactgagaaaacagctttcccaagagacaaaaaatacactattctctaatggtattcctttttttatgctggcatgcacttacaactttagtaaggtatcaaatttgttcatatggtctcatgtatgtactcacagctacctatgcagccctcatcttatgacaactttcttcttcaagcatgcaagctcatcagtttcacactaaatgtgatctttctgtttcttgttttctgtttgctttgatgttgtagattgttatagttgccaattaatctcttcttaatggaccaggtgcctgctatgagttccttgctcccctccccccgtgttctgggttcctgaaagacacactacacatgtacacacatacacacacacacacacacacacacacacacacacacacacatacagacacacacagccttacatcttaatatgccttgaacagctcaatgactgagtcactcccaagcctccacattgtaaacacctcccctctgatattactgatatttactaaaatctatatttcatttttgctgccctagaccgagtgagaggaggggctgggactgggaccactcttccacagttcttacatgattgctatgttctctcttctgcacctctcaggcctggtctttccctgcatggcagctctatcttcttcctcattccctggtcccttgcccgggaatcctaaagcccagcctatgtctccctgccctgtcattggtcactagcaactttatttaccaatcaaaatcaactgaggacagggaacttcagcatcttacatgcagattatggtgcaatttgggggaccctagtaacataacacaaacattagaccaaatccacattagacattattgttgttgttgtttttaagggtagcttaaataaccttaaactaataagggagtagaaccgtcttttggaatctaagtgtgccgagtttacagtaagcctgtaactcgtatgaatgtttcattctgattttagatttggctaaagaaatttgtttctagttttatttggcaggtttttttttttaaagtctagatgttgaatttgtttttttttctgtagatattagagtagacatgtactgttttttctcttcaacatcttaatattgtaaaatagcttatatatattttctgagtgtgtgcctgagaaagtaagccctacttggccatgctgtatatttttttaccatattaatgaaagatgtgggcttcagtctgaccactcaaagactctcttcactcatctaggctctgttatttctgataagaacttgccaatcaaaatgtctcatttttcataggctgctttcattatttttaatcacgttttaggtctttaataatgatgcagctaggtgtatatatgtttatactttttctttttatcccttctttagaaaggaatcatttctagtgcattgctgtcaggcctagtaatgttttggttatcactggctatagtgttagatactatcaatcaaatagttctcaggtaaatctatcatgactaatgtcaagctggtttcctgatcaggctgtttgtagaatgagatatatttataccttccttgtttgtcaaataattttctcttataattaccagtgaattaaaagacctctgtcataacttgctttctattgctgtgacaaatactataaccaaaggcacgctggggaggaaagtgcttaccattgagagtggaagtcagggcaggaactcaaaggcaggagcctggaggcaggaactgaagcagagggcatgcaggaacacatcttactattttcccagtggcttgctcagcctgctttcttatacagtgaagctcaggcccatctgctaatgggtgatactgcccacaatgtcctggaccctcagacatcaataatcagtcaagaaacttccctacagacacagctaatggagaatctgatggaggcaattcttcagttgagattcctttttctcagatacatctagatttgtgttaatacaaactaggaagcacaaatcctatattatgttatatttctctgaagatcaataatgtagttttaatgagttacattggctgaattcatattacaaaacccttttcattctaattggcacttgttgaaactccactttttaaatttttccccctaaactagaaaagaccagcaagagatttgaacagtatttagattccgaatttgggacaaacttttctccagggctttgtaagccccacccatttactttccaggaatggcctttgacataaaccagtggttctcaacctgtgagtcatgacccatttggggatctaatgacccttttacagggggtgcatatcagatatcctgcatatcagatatttatattataactcataacagtgacaaaattgcagttatgaaataacaacaagaataatcttatgcttggggctcactacaacacggggaactgcattaaacggttactgaattaggaagcttgcaaatcactgtcctaaactctaaatttggatctttcaattcaccttttcccacaagcttttcctttagctacacagttaagtccttgtgctcagcctaaacctcttataaataataaaatggtcctgtgctgtttaatttttccaaactttgactccaatccagtatctgccaaatattgttacatttccatgacttttattacatttccagtgtcttcaggtagttgttagtgcacatactcacacacacacacacacacacacacacacacacacacacacacacagacacacacacacacacacgtgcacatgcaggcacatatgtgcatatatcatactttgtgtttagcaatacaatttacatattatgtaaaactatattatataaaactttgatttttcaagcaggagaaaatgatgaaattttcagactatagaatccatctactaggttaaaaaaatttaaacatgtgttaaaagagggtgagtgtaacagcttcattcagtgacatgtgacctgcctactctccacccttccttgttatgtctttatatttagtccagagttaataattatctgtgttgttgctccaataggaactttggatcattccggaaacttaggatacattttatgtaatattgaattgcatataattgtcttagttgggttgcctttgtgaacatgagcatatagactaatctctctcccattagccttatatttgacaactccctgggatctaaccacttctcatagtgtcttctactaccattcactcacagttagtaccatttgtctcttggttatttctgtcatctctctactacttctgtccaccttgagacttctttctactaggaattgaacccacggctttgcacatattaggaaaaccttcacgactgagcctttatccctgagccttttctgaatatagaaaccaggccattcctgttactattctgctcaaagtcaacaatgtcttctgctttgactttaaactgacatccaaatgcaatacaatagcctgcaaaatcttacagaattaaattcttattgaatttcttaagctgtctgttttttctttctgacaatgtcataactctctctctctctctctctctctctctctctctctctctctctctccctctctctctctctctctctctctctctctctccctttctctctgtctctctctcacacacccacacccacacacacacctccagtcacactcccaccataggagctacacatttcctcttactcttcctaatgcatacatagctaacatccttccctgtggatacttacagggacgtattctcctgagcaagtatatgtaactgcttactcatcaccctctcagtgagcacacaggctcacttctgttataaggcacattagggtatctaatgcccatctgatggtcttacagcacatctcttctaatgttcatagacttctgtttactactttgatttcccttcccttctccatctgaatattaaccatacaaatgcaagattctttgatggctctgctcattgactatgagcacactaggagttagacacagtaagatgctgaatgcaggaattacaccgacccacttaaaaacagagttagtttctttgaatccccagccatctctaacagtgcttgacagattgtttaccctcaaaaaataattggtggtttagtgactaaattctttcttaactttgtaatattatactagcttcagtcattaagcttactggattctctactctaacagagcttatttaccaacaatttgggtgaaactaataaagtggtgtgtttttaaaggtttttccatcactgaccccattttttttaaatctcctgaaggtcatttgtttactgaagctttctgcttcttaagtgactttctcagagagttgtatactgttcagcttcaggtttccagtgaagggaagggtgggtaactgttgaattctaatccctgtgatatgtccactaattattaagtctttgacttacagttgataggaactttacctagagtttgtggtaaatcttaactgtattccttcatccatttcttagcacattcttgatctcttagaaggtagatgtagtacttcatatatcgaaatatcaaacaaactattaattgtgtccttttgcttttattagtccaaatttcaatagcaccacgattccagctgaaattctctttaatacattaccaaccacaaagaatagctccatatcaatgtactatgcatatgggtacaaacatctttaaacaatgagtttaagaactgtgactaaatcagttttcctcaacctctctggtcaccactataacagaaatgatgatatgtctaatatcattgccaaatactaaggtaaaatagatatcatttaggagaaagagttctgaataccctaataaataatagtttattttatgggttacaacgtaacatattgagaagactcttcagaaccagcttgtttctaatatatcatatccagataagtggcaaactatatccttaatgtcaagtcgttttaaagaacaaattactattgtgtttaaagtgtctcttcttgttggtattataatatacaaagaaagtaatgtcatgtctaagtaagaagagcatttattattatatgtattgctatttccttgattgtgatgcgatttatctaagattagagtatgagggaagaaaatgaaccatattcccttttacagaaaaggccgccatagttttgaactaaggatttactgaaataacaacccaacagtggcttcagaagcaagacaggggctacgactgaaatatgagagttggatgacctctccttcccgctcccatccttctggtctgtatgtcatgtcagaagaaagacaggtgtaggaggcacaagactgctattccattcattcatatgtgtgtgtgtgtgtgtgtgtgtgtgtgtgtgtgtgtgtgtgtattctaattttagttcccagcaatatgactgtttgttctggccccatctcactgggaagttattaaatactcatccacatggcaccaaatgtttacacagaggccaaagtttaagtcagtcagcagcaaatggggctttatccatgctcactaaatgatacttaaggaccagctctttggggcccaggtaaaccctgcttacatgaaagtgaggcactgagtgagggagagcatgctgtcactctaagaaatctaccctacatgctgtagtcaatggagggaaagcttcagctggccatctataaataagatggcactcagttaacagacgagcctgatgcccaggagcacatgatgtacacgcactggggcagacttgaaataactctttctcagtatgtacaaagacaattcttcagcaaacatgatatgacatagtatctccccaccttcctctcacctgaatgcttggcatggacagacactgtgaggagcatggggaatactgaagtaaatggcgctagctttgccttcaacaagtgtaagccatcacttagttaaggttggttccttttaaactgatcatttatagctagtatgcaaatagtctatatctaactatagttagttggtacagtatacatacatgtggttatttccaaggaaattgttacttatacattttttaactttgtaatataagaatttatttacattacagttacaaactcatctacttatccatgttttcttattaaaagccccccaaagctataggcagcttgttttaggtaaataaaaatagaaaaaaatgtacacataaacctctagtacatatacatatacatcatatacatcatatacatatacatatatatgcatatgcatatacatcatatacatatacatcatatacatatacacctgcatatacataatatatatatatatatatatatatatatatatatatatatatatatacatgaggagtgagtcaacctaagattcttttgaattcttgttatattgatcttggttattcacatgcttttttgatggatgacataacatttctcttaaaatccaactcaacattggaatttttaaagcacttgttagctgttgggggatatctatagaaatgctttaatatgttttggagcttacttttggtttttaaatcagtgctttttaggggctgtgcaaatggttctgaacatagttaagaacatagccgttcttccagagaacccagattcagttcccagcacccatgtggcagattacaactctttttatctccattcccaggggatctgctaccctctctagtctccacacataggctgtttacacatgtgatgtacagacatataaatacccataaatgtaaaataagagtaaaagacaaactttaatattttaggggtgttgttaatgttgtttgtttgattgattgtttaagacagggtttctctgtatagtccctggctgtcctgaaataagcccaggctggccctgaattcacagagatccacctgcctctgtgtactaagtgtaaaggcaggcaccatcaacacccagaaaacttcataactttgaaaagaaaaagaaaaagaaaaagaaaaagaaaaagaaaaaaggaaaaagaaaaagaaaaagaaaagggggaaggggaagggaaaggaaaagaaaaagaaaaagaaaaaggaaaaggaaaaggaaaaggaaaaggaaaaggaaaaggaaaagagaaagaaagaacaagctggggtgggtgagaaggccacgtggcaatgtctaactgttaatatagtcatcttttgaggaaaagtttaaagaaacaccgtgcatatggtcaagaagagactatcatgaaatatactatttcttttattcatttctccctctcatatgtcacttattaacatgtaggggtcaaaacagattataaatatcatttgtaactataaaattttattatagtctccttcaccattgtctttggaaattttcattttcttagctatagggctaagtttaactcagtattagacatgtgcctaacatgcataaggctcaattctcaataccacaccaaaaatcaatcaaacaatcaacaacaacaaagcagttcaagtaatctttaactagatctaatatctatcctttcataatatattttatttaaaatgtctcttcatcactctatatataaaggaaggaatggcttgactatagactcaacataaagaatcaccagtgtcaaaaactatggaaggtatggcatagtcttctactgagggataattagcctgctagcgaccactatgtgaagcactgaagcagctgagaccctcccaactctgagcaaaccgcatgtccatgattgagaatgcttacttagtttcagtgctgtgaacttggcagcttctcagcccctttcatctcaacgcactacagacccaagtgggtgctccacctgctgtggatttatcaaggttaaccaactccaaaataagggaacccaagtattttataacggactgcaaggaaggtttctctttgtctagagagagggttaatctctgatatcccaaatactaagcaactttcacattgttaggggggaaagtctttttaagaaaagagtctgtccagatgtggtggtgaatgccagcaatcccagcactcgagaagctgcagcaggaggattggagtttgaggtcaaacagtccttagcaccaccggggaaatgctgaacaaggcaaagggacagttacaatccgcctcacaaaacatgcagaaatggaaacggcacgtggaaagacccactctcctctatgccattcctcctttctgcacggtcttggtttctgaccagttttcctgcatgagctatataatcaactgcttgcatgtaagctcaccgaaggaagccgagactaaaactctgtcgcttatctcacatggcatttaataaaaggtactgatgacaggattctaagcaggtagctgatgaacagtcagtgcttctggggaccccaacatccaaccaatagaacaaaccccaaaattgatcgagccccgtcttaaaagccggtgggatattctctgtatgtttctgctctgaactttcttcttgactgaatacattaatccaggaacatcagtggcaggcatgactgtaagagttagagactcattctgtctactttggaggaaagtagtgggggtgctttattaggtatcattttttgctttatttttcattaatttatttattatttcactttacatcctgatcgcagtccccaccccatcttctcctcccaaacacacgttcacaaaccactccccactaccccccagagaaggataagccccctatgcgtaccaagccaccttagcacatgaagtcattaagggcatatctggatcaagaatattcaggtagccaatccaaaatggtttcaatctttatggcctccttttgtccagacctctatttgaaaagcccaggcagatgctggcaaggatgtggagaaaaagggacactcctccattgttggtgggattgcaagctcatacaaccactctggaaatcagtctggcggttcctcagaaaattggacatagtactaccagaggatccaacaatacctctcctgggcatatatccagaagatgtcccaacttgtaataaggacacatgctccactatgttcatagtagccttatttataatagtcagaagctggaaagaacccagatgcccctcaacagaggaatggatacagaaaatgtggtacatttacacaatggaacactactcagctattaaaaatgacgaattcatgaaattcttaggcaaatggatagaactaggaacactctcttggaagcacgggggtggggggagaacaggattgggggcttccagggaggggccaggaaaggggaaaacatttgaaatgtaaataaagaaaatattcaataaataaataaatgcaaaaaaggagaaaagtctaatagaggattaaactgttgtgctcattagattttgtcaactcaaaacaaactagtgacctgggaaggacaaccctcctttgaggaaccgcctccatcagattgatctgtgaggcatgcatttctgggcaatttcttaattgttagttgatatggaagagccaagactactgtgggcagtaccacccctgggcagtaggatttagaagagctgtctgtgtaagaaaagtaactgaacgagcctcaggaagcaagccggtaagcgtggtccttcatggtctctgcttcagctcttgccttcagctcctgcactgacttcctttagtgattgattctaaccagttacaagttactttgttttatcatagaaatgtaaacgcagctaggccagccacttacaaacaggacaaatggaaaagtgtgagctcatggagtgtaacaataaccaggtctttgtattgcatttcttttcaagcaagacctagggaagggctgttctgccctctccccaaccactgctaattgtattgcagaatcattcaacttctaaatagcactgatccttgagtgcttttcctctgatgctttgctgtcctctctctttatgacatggtgttaatttttcattccttttgttgtagactatcatccaattttacagtgcccttccaaatataacactctagaaggcttagcactttcatgaattaagaatgtcatgagttccctcattattaagtctggtaatactgacctgaaccgcccttatcacattcaagtgaagcagatctaaataccttctacatcctaagggtttctttgaaagtagaaattgaatatattagaaataaaatagttttttaaaaatattttattaggtattttcctcatttacatttccaatgctatcccaaaagtcccccataccctgcccccacccccctacccacccattcccactttttggccctggcgttcccctgtactggggcatataaagtttgcaagtccaatgggcctctctttccagtgatggctgactagaccatcttttgatacatatgcagctagagtcaagagctccagggtactggttagttcataatgttgttccacctatagggttgcagatccctttagctccttgggtactttctctagctcctccattgggggccctgtgatccatcgattagctgactgtgagcatccactctgtgtttgctaggccccggcatagtctcacaagagagagctatatctgtgtcctttcagcaaaatcttgctagtgtatgcaatggtgtcagtgtttggaggctgattatgggatggatccctggatatggcaatctctacatggtccatccttttgtctcagctccaaactttgtctctgtaactccttccatgggtgttttgtttccaattctaagaaggggcaaagtgtccacactttggtcttcgttcttcttgagtttaatgtgtttcacaaattgtatcttatatcttggtgctggcgaggatgtggagaaagaggaacactcctccattgttggtgggattgtaagcttgtacaaccactctggaagtcagtctggcggttcctcagaaaattggacatagtactaccagaggatccaacaatacttctcttgggcatatatccagaagatgttccaactagtaagaaagacacatgctctactatgttcatagcagccttatttataatagccagaagctggaaagaacccagatgcccctcaacagaggaatggatacaaaaaatgtggtacatttacacaatggagtactactcagctattaaaaagaatgaatttttgaaattgctaggcaaatggttggacctggagggcatcatcctcaatgtaacccaatcacaaaagaactcaaatgatatgtactcagtgataagtggatattagcccagaaacttagaaatacaatagttttgatattagacatatttggcgtatgagctaatcttcacaacttactcatagggtcatattcaggaagtgtctttatatataagtaaaagaaaataattctatttttgacagtttttaaagttattcaattaaatgtccattctcccttttccagtttattgtttgaatgtgtagagatcatgcaaagccatgtctttttagttctgtgcaaagaagagtctttttgtttatttgtttgtttccttttactgaaaatagatttttttcctctcatatcctgattacggattccctatcttgattcctcccagtctctgcccacctacactcccatctgaatctaccccctttctttctctcactagaaaacaggcttctaagagaatataatataatataattataattataatataaatgtcttagtcagggttcctattcctgcacaaacatgaccaagaagcaagttggggaggaaagggtttactcagcttacatttccacactgctgttcatcaccaaaggaagtcaggactggaactcaagcaggtcaggaagcaggagctgatgcacaggccatggagggatgttacttactggcttgcttcccctggcttgctcagcttgcttgcttatagaacccaggactaccagctcagggatggaaccactcacaatgggttaggccctccatccttgatcacaattgagacaatgacttacagctggatctcatggaggcatttcctcaactgaagctcctttctctatgataactccagcttgtgtgtcaagttcacacacaaaaccagtcagtacaataaactaatacatcagaataggaaaaaacaaacaaggaaaagaacccaagaaagggtacaagaaatagatatagatgaagaaacctattcattcaaacactcaggattctcataaaaacactaaattagaagccataaattatacacaatgacaatcattccttctcctcattccctgagcactttgggaggaattgaatggaaacattctgtttagggctgagtttttcaagctctctcattctatgcatgatgtatggctgagggtctctgtattgttccatctgctgtaggaggaagcctttctaaagacacagagcaaaagactgccccatgagtatagcagaacttcatttggaatcattttgctgctatattttatttgtacatttgtttgttttccaacagtaatatttggttttaccctaggaccctggctatttattctgatgttttcagtgtcaggtataggttccgtctcacaaacctacaaggagtaagtaactaaggccttaggttaagtgagatattggctggttacttccacaagctttgtgtcaccattgtactagcatatcttgcaggcaggtcaccactgtagaacaaaagatttgcagatggtgtttaggatccttcatttgtagtatgcagagttctttcctgtactaaagaggtgaaggctctatgtagaccccaggttgacttgatgttcagtgaagttgtataggcactatctacagcagtggggactttccattcatattttgtagagagcaacatataggcaacagcctgcgttgtttgggattctcatggaacccctttggccaataactatattatacaataacaatattaaacgtaacccaattcaaatacttgctgttacatttgtaacaagaggtgaaaagttggggctctatctacctcatttttttgggtggttttatcaagattgtctttatatgtgtctttctttaaaattctactgttttagattcccataccaccctacaaatgggtcgtaagtctctttccatattccattcatcatcccacttttctctctgccttccttcttgatcctcctgttccagacgcccatccatccaaaactacctattctatttccctttcttaatgagatttatctgccatcactcttactctatacctaccctctgtagtactatgggttatagctttgttatcatttactcaacagcaaatatccacagataagcaaataggtattatatttatctgggttcctccctgaggataggtttttctagttctatccatttgcctgcacatttcatgatttcctttttaacagctgagtaatattacactgtgtaagtataccacagttttttatctactcatctgttaatagacaaagttgttttaatttgtgactattatgaatagaggagcagtgaccatggttgagcaagtgttcttgcagtaagctgaagccatcctatcttcctaaggaactgcaacagtgttatccctataggctgtagacatttgtacttatatcagcaatggctgagtatccctcttaccctacagccttcccttcatgaactgtcatgtgttttgttgatcttggtcatactgattggtgaaagataagattttcattttgagccgggcgtggtggtgcatgcctttaatcccagcacttgggaggcaggcaggcaaatttctgagttcgtggccagcctggtctacagactgagttccaggacagccagggatacacagagaaaccctgcctcaaaaaaaaaaaaaaaagactatataaatgaataaataaataaataaatatattttcattttcccgataactaatgtggttgagcatttaagtgtttctcagtgatttgagtttatctcttttgagaattctgtcaagatttgtaccccatttttaaacgggttagttcttttcttgatgtgtacgttttctgagttctttatatattttggctattataccgttatgagatatgtagttagtaaaacattttcccattcagtatatggccactttagcaaatgatgtcctttgctgagcagaagattttcagtttctgcaagttttcttttgtcaatgagctcaagttggtcaagttcagtgtacttggttttatgttgaggtcttggatccatttgatgttgagtttctgcagcacatatgtagcctgaaatatgaaaaaagcaatccacgctatcaccggcaaggcactggtgggcctcgttctcatctcgtggagactctcagagttccaatatctctccacccagctcgctaagttcccatagtggggtcactgctatgccagccgcacacttctgaatacaatactacccattgtactttttctctggaactcagtcaagttgcctcatgaaggaaaacacaatcattagtgtagaatcaaagggcaacacaatcattgggcacagcaattagcatcctaatagtaagacagtttaagttaaatccactggtagctgaggatttaaatctctgttacccacatttttgctccattgtccttcctgtccaaaaaccctctcctttctcctgcccctgtcatccctgcatatgaccaggaagtccgcctacttgcccagtgattggtttctttattcattagaagggtcacatgaagtcctgagtacatgattcactactcatcccaggcaacccctcttggggaagcagaattagcatcaaaatgcaaacagcaccagggctgtccacaacaggcataagtatagatccatatggatttttctataagctgccatcccagtgtaacaaacaccatttgttgaagatgcaatttttcagtgtgtatttctggcctctttatcaaaaattggatatccatagctgtgtgaatttatgcctgtgctttccattcaattctattgatctgcatatctgtttttctggccataccatcctgtttttattactatacttccgtagtactatttgaggtcagagatgataatatcggctctcttctattactcagaattgtttttagctatcctggtttttttgtgtttctgtatgtagctgaaaactgtcttgccaagctatgtgaagaactgtattataattttgatgtggattgcattgaatctgtagattgcttttggtaagatatccatttttactgtattaatccataagtataggagatctttctaccatctgatatcttcaatttcgttcttcaatgatttgaaatttttatcataaagtctttcacttgcctggttagagttacccccagatactttatatcatttaaggctattgtcaaaggtgttgttccctaatttctttctcagtccatttttttttcagttatatctaagagggcatactgatttttgtgagttaattctgtatccagctactttcctgagtgtttatcagaggtaggatttccctggtggaatttttagggtcacttatttatactgttgtctcatctgcagagaagttatattttcagtttgtatccccttgatctccttcagtagtcttcaagtactgtgttgaataggaatagagagagtggccaacctttcttgtgctaattgctttgagtttctcttcatttaatttgatgttggctatgggcttgctgtaaactgcctttatgatgttgaggtgtgtcccttggatctctaatctctccactccacgactttaatcatgaagaggactagatttttatcatgaagagaagttagattttatcacatgccttctctctttttttaaaaaatgaaatcatgtgagtttgttctcttggattgtttgttcatacagtagatattaaatcatattttccaatttaaactcttgatctatccctgcatctctggaatgatggggggatgatataattgatgtgttcttagattctgattggaagtattgtactgacaatttttacatctctattcatatgggaaaatagtctataaacctctttctttgctaggtcattatgtggtttagttagcagggtaactgtgggcttgtaaaacaaattggacaatgttccttctgtttctattttgaggaatgatttgaggagtgttatcattaactcttctttgaaagtctggtagaattctatgctttaagaccatttggctctgtgcttttattggtttagagaattttaatgacgacttctacttcactgggggttataattttgtttaaattgcttatcttatcttgatttaactttggtaagtagtctatatggagaaaattacccccttttagatttttcaattgatggagtatacgtattaaagcatgtccttatgattctagggattttctcattatctgtttttatatcccccattttctctaattttgttaatttggatattctttctcctctttgtggttaattggataaggggtgtgttagtcttactaatattctcaaagaatcacctctttgtttcatgggctttttnnnnnnnnnnnnnnnnnnnnnnnnnnnnnnnnnnnnnnnnnnnnnnnnnnnnnnnnnnnnnnnnnnnnnnnnnnnnnnnnnnnnnnnnnnnnnnnnnnnnnnnnnnnnnnnnnnnnnnnnnnnnnnnnnnnnnnnnnnnnnnnnnnnnnnnnnnnnnnnnnnnnnnnnnnnnnnnnnnnnnnnnnnnnnnnnnnnnnnnnnnnnnnnnnnnnnnnnnnnnnnnnnnnnnnnnnnnnnnnnnnnnnnnnnnnnnnnnnnnnnnnnnnnnnnnnnnnnnnnnnnnnnnnnnnnnnnnnnnnnnnnnnnnnnnnnnnnnnnnnnnnnnnnnnnnnnnnnnnnnnnnnnnnnnnnnnnnnnnnnnnnnnnnnnnnnnnnnnnnnnnnnnnnnnnnnnnnnnnnnnnnnnnnnnnnnnnnnnnnnnnnnnnnnnnnnnnnnnnnnnnnnnnnnnnnnnnnnnnnnnnnnnnnnnnnnnnnnnnnnnnnnnnnnnnnnnnnnnnnnnnnnnnnnnnnnnnnnnnnnnnnnnnnnnnnnnnnnnnnnnnnnnnnnnnnnnnnnnnnnnnnnnnnnnnnnnnnnnnnnnnnnnnnnnnnnnnnnnnnnnnnnnnnnnnnnnnnnnnnnnnnnnnnnnnnnnnnnnnnnnnnnnnnnnnnnnnnnnnnnnnnnnnnnnnnnnnnnnnnnnnnnnnnnnnnnnnnnnnnnnnnnnnnnnnnnnnnnnnnnnnnnnnnnnnnnnntcggtatgtaaggatcaatatgttatttaagctgtaacagtgtatcttttatgaagttgggtgcttttgtgtttggcaaatagatgttaagacttgttttcttagaattttttctttggtgaccatgtattgtctttctccatctcttttgattggctttggtttgaagtctattatgttatgtattaaaatggctacaccatcttgcttcttaagtcctttggcttggaatattctcaccatttttttttaaccttaagtgatgtctattcttcatattaaggtttttgacatggatacagtaaaaggttgtatctatcctgtttatgcatccatactgttaatcatgttagtctgcatctctttattggggaattgagaccactggtgttgagttacatctgtgagcagtgtttattgattcctgtcattttgctgttgtggtgtattggttcccctcttttgattttcttgtttgggattatttaatctttgtgttttcttgggtgtggttaattgcttcaagttggagatttttttttttttttttttttttttttgtcgcaccttctgtagggctggatttgtagatagatattgcttaaattcgggttttatcacaggatatcttattttctccatctattgtgattaaaagtttctctgggtttagtaatctgggctggtacctgtggtcttttagagtctgtagaaaccatgcccaggcccttcttgctttcagagtccccactgagaagtcatgtgttattctaaaagggcttcccttatgtgtaacttgacctttttcccatggagcttttattctttcttttcccatgcatttagttgtttgattatttattatgtgatgaggaaatattctttcctagtttggtctatttaatattctatatgcttcttgtaccttgataagtatactcttgttgagatcagaaaacttgtcttctatgaatttactgaaaatattttatgtctttggcatgggtttcttcttcttcctttattcctattattcttagatttctgtcttttcatagagtcccagatttcctggctatttcatactagggaggttttagatgaacatttcctttgacatatgtatccactttttctgtcatgtcattagtgtctgaaattatctcttccatctccccagtttgttgatgagcattgaacctgatgcacctgtgagtttatttccagatctccttcagtttgtgttttctttgtttctatttctgctttcagctcttgaactttttaatcagttccttccactgtttgtgtttttatcaattcctttaaagcatttatccatttcctctttaaggatttctgtcatatttatagaggctatatcaggtttttgtcttgagcttcaactatattttaattttcggagtctatagtggtatatttgggaggctctattgtagatatgtattgtcctggatgctattgattgtctttctagactgacatctagatttctagattttagaagattataattccaggtacaaatgtgtgtcttgtcattattggctggctgttttgtttcttagtttctgttgctctctctggcacttagaatgtggtggctatgaatttcctggtagtaaattcttctgggatcctgttaggtgtggctactaggggttactggtaaaatgtgtttctaggcattgggaactgactcttagcattggagatgggttgggtggggccctgaagaggccaataggagagagaaaagcagggaatttcatcagtatctgcttagtccccagggaatgtcatcacagaatgactagagggcacaggtagtctgctacagaactgggaatgagactgggagtttgtatatggaggttagcagagtaagtgaagatttgaagtatgcctacttgctttgctgccctacctattactcttgcaggcttgcctggctgattcctagtgaatgcctactgaagttgggaggtgggataaagcaatgagttggaggcagaaagtttggaggagaagatcactggagatatgggaggagtggggagacagagttgggtggtttgctacagagctgggtataaaactgggaagatttagaggagagggacaagaggtcaggaatggcagctagccttttgcatcctgcctagtgtggctggtaggttcccagggactgcctacttgtgtttcaggctgggatgatggagtaagttggggaaagaaagcttggaggaaaaggtctatatgatttcaggagagtctctacaagctatacttgatttcttcttcctcgatattgtggacttgcttgtgatgctctgtattttcttgacttccgagtgtagtgactctcaagtcctcttgatgtatacactagacacactgtttgtttttcaaaagcatgaaaacaactttttgattacattgcttcatcaagatattatgaaaacatgaactataatttactctcatgccaacttcttagggttttgcaaattgaaaattaggtggcgatgatggccttgtagtgtggttctttggagactgcacctgacccatgcaactgtcctagtaagctgacacatggctccagatatcctggggcctctgtgggacacaccatgatcaatctcatcattgggattagagaggcacagccttcatctctcagcctagaaaacagatgcagttacatagctgggtagcttgacacttgtttttaaaaggcacagttcaaagaaatatctgtccataagtattagcctgttgatctgaaatataatctccaccaataacaatgtcgattcttagttggctcctgaattcatctgtcacagtaacattatcaaggaacaggctttttttctcagtataaaaactgcttttacacatttccttacttagcaccacaaaacgccaaaaccataaacaatatgaccagttttcttataagtacacaaattatcaaaattcaccttatagtgtaaattcacagagttcttggggatcttgcgaatgaagaagtaactcttaggaagccaccttggcatttgtctctgtggcacactttattatatgaattgattcaatctgtaaaacacatttctatggtcctggcaccattaaggacaaattaaacaataaaataagtctttaaagattctatagtcaaaaaggtaaatttaccaccataacaatatgtttgcaataaataagtaaaaatgaattaaaaagttattaccaatgcaaagctatgcttagtatttaaatttattatttatttatttatgtgtatgtagatgcattggcctattgcataagtatgtgtatgcagatagatacataaatgtatgcatgtgtatgaagaccaggtatcaaccttaagtgtcattccttgggatccatccaacttgtgttttgggctgaagtctctcccagggctatgataacttgctgggtgctcccaggatcctactctctatcttcccagtcctgagattctagtattcagaatagggtaattaagaaaattaggatgaacaggataactatttgcttgagagagggtcttgctttgttcatgaactcacaatacttttgtcttccacttctgtgtgccataattataggtgtgtgacaccatgcctagggacatgttccattttaatcaatttaattaagataattctaaaaacaggctataatacctggtctttatgtgggtgctggaggtagaacttctgtcctcatttgcaaacgcaaagcaagtattttatcaactgagctaccaccccagctctacagacaggtattttaaataacttcataggttctgtttcgtaatttgtatagatactttaattcctttgtgttaccctattgtgatgctttgtatattcttggaccaggaagtggcaccatttggaggtgtggccttgtttgaataggtgtgacctggttggagtaggtgtgtcactgtgggtgtgggcttaagactctcaccctagttgcctggaagtcagtcttccactagcagcctttggatgaagacgtagaactctcctcatctctgcctgagccatgactgcctggatgctgatggactgaacctctgaatctgccagccagccccaattaaatgttgtttttataagattttccttggtcatggtgtctgttcacagcagcaaaactctaagacgcctatctttcaaaagtaaatactttaaaaataaatttgcagcagtataagacaaataaaagaatacacattatatttcttcctgtaatgaagagcaagcttcaagtgggagactagtgtttactttcattcttacccaatgttgtcccgagctatcattctcgccagcaagaacacactcggacaaccggattcttctgtggcaagctttattgcttcttaaggagggaagaccccgaccccagaaaatggtgctgcttatatagcccgcagcgtggtgtttcagcacctgatgtggcatgtcagctcctgatttgttgctcacccatcacctcattactatggcccaagatgggcagtgactaggcatgagttcactctcgcacttgcgcacaaggcttgcttactagttaggcacagcggaagctcgcggcacggctctccacatctccccctttttgttttattaaaatgaggctggactaggtctgtgtaattatgtccaaccgctgtggctcctgtcttagatcgttcctctaatgtcacagcctttcccgtcatagggtaaccctatcaccactgggccctgtgtcttaggttaatctgtgcatgaggaaagttgcccatccctggataccacagtgctatgtgacagtaactactaaatgacctagggcgaactctacaaaagaggccagccaaaaaaatcacaaatgccgactaattcttgagcatagatagccaaatttcaggggagaccccttgctctatggcagcaagtgcttgagctatcacgaccttgtcatatatttgttgggctctgagcttgcaaaccaaccagagcatgaacacaagtccacagcagatggcagtaccaaataaacctaccccaacccagtccttaaaataagaaaatgcagatgaaatccaggaggagaggccctctgtcaatgacaggtccactcgcattgagttgatccttaaaactgccaccctcagggcctcaagagtctcatcgaacccctcagaccaattttctgcaagatacaagaagagctgtctagacagaatagctgcacgagtaaaattttcatattggacactggtaatacacagagtgcccaattttctttcacaacccaactgggccaactggtataggacgcctatatgttcctcttttggaatgaatgagtctgaatgatacctctgcacatagggcggaggtgcactaggaccagtgcgcagcgaactgacagttgtctctagctgcttctgtcttattctgtgactgattagctcatccttcatctggctggtatctttctccctcatagcgagccgcttcttcctctaagtctgtttcctcagaggagctaagttccttatccgattctgagctattaacagctagtcccttgaactcgtctaatggtggatagaggctccttcccttatgtgcctccccagctcgatttctcttctctccctttccatccctttttctaagctctcccagggcattttttcccttatttctcttttcctctggctcaaggcccatggaaaggcctttattcttcggtgcaccttgttttgtttcaactcttaatctctctccccgctctgtctctgatagactgtcttgaacctcctccagtatcctctgccccgcctcaaccatttgctgacaatcctcgtctgttaagcacgatcttaccagtttccacaacggcatggtccctgctttaagtttgccgttctgctgttccctaactagatctcctttcagtttctcccaagaggcgatagttaatgaccctgagcatgcataccacggcgctacgcgatctatctctttaacaaaaccctctatagtcttagtggcgatttttaggccacactgcctcaagaccgaccgtaaggcggtcactacggagtgggaagttcccatactgctcactgccctgttgtctaactgtgcctgaccgtgactgagaaccagtcagcagttccagcagtggaagcagtacatgatcaaaagaaaaagaatgagccccgtgaaaacatacaaaaaacactggagaaatttcaagaccgaacataccttacagagccttacgtgtcccgcagttctgaaccggcctgcgaacagggaatctcccttgcgccggtgatggtatgcagttcctgggtttctcagcaccacttgttccgagctatcgttctcaccagcaagaacacactcggacaaccggattcttctgcggcaagctttattgcttcttaaggagggaagaccccgaccccgaaaaatggtgctgcttatatagccctcagcgtggcatttcagcatctgatgtggcgtgtcagctcctgatttgttgctcgcccagcccatcacctcattactacgccccgagatgggcagtgactaggcgtgagttcactctcgcacttgcgcacaaggcttgtttactagttaggcacagcggaagccagcaccatcttataatggtgattgctcgcggcatggctctccacacaatgtgaaaaaaaaaacaggttgtataattttggcatcaagtgggatttacaggtgaattatattattttctaaattggattttctttatctatggcaatcaatgttctcattgatccttactatacaaacgtttgattcatctaaagaattagaatctgaatacccattcatccattcatacctaacagactcaggatgcattgctgcataatgtccacacagatagggaattgaggatatatataccacatccaagtagagagccatactgtgagacagacatcagtgttagagggatgctcgtgagcaatatagatgtctctactttcaaattcaaagccaaggttgttgttaaaatatattatccccagttttatcaaatgtatcaatggcaactaagaatagctatttcagactctataacatgaaaggttgtattttctgaattcagctaaatataagtggaggtcactttggagatgtacctctgaaatcacaggagtggttgtcactcacttgggttgtttctgaagcttctggggcttatttgaattgctacatgtttgagcagtgtacaggactgctctcttttacatggatgatggtaggaaacagttggtcattcagttaggaaacttacagaagctgataatataacccaatatgtactacacatactaacatttcagaagaaatgttccaggagccatagatgaaaaaaattgatctcatgttcttgttactgggaaagctatttataaggattttttaatttatggaagggtctatactactcttcattttagagacgctgacattttagtattcactgaaaactacttataataaaaccacagacttttgatataaacatagaattcattttgagcacatactctaagaaagttttgtgtgtgtcattctaattttttaatataatataaactagcgattcctttaatcattaatatatttttatttcacttttcatagttaatatgtaactatttcttgtgattggactatgtatcatttatgtttttatgtagtcactttttcttgaataaaacctatcaaaaataactaattgttaaatgaaccacctaaacttagaagaaaaaattcattttttcaatgcatgcaatttaggaacatttcttcttgttatcatactaataataagggttattcacattgacagataaactgctctcaatttttttagtatgtattatatttgaaaaataagaccctagtagcattttgaaatgtatgcagatgctgcttaattttatgtttcaggcctatgaagcatattataatgcaacaatcataacacttaaagtatacttcaaaggaacttaaaagtatactttccacataagactttagtcaaagtggttaatagccatcgtatgcactttggcattcctggcaaggggattcagataatacttcaaaaagaaaactcctttgattttagtcagcttctttctttgattgagaagttatgaacatatcttgcctctttttgtaagtgaaaatatgttcaaatgtaattaatctatcctattaactttactaaacatctgctacatttgctaaacatttcaaaatgctgttctgaaccacttaatgctaagtaatttctcagctaaatatttacaccagctttcataatgataagccctactgtgtcttaaacaatcagccaattttcctgagagcagtaagacattgtaatagctactcactggaacttgaaatatgttagctggctaaaactacattttgcatatctttgtttctagccaaaagatgtagcactcttatgatttccatttttgtcaacgtttttaatatccagaactccacggacaatgaatgtctatatagatgcctagatcatgaaaatgcaaaatacagtctcaagagtctttcacaagagtaagtctgtatatctgtaacattatagaaaaaactagctattacaatttataacatattaaataaatagaaaaatagatcaaagggataggtactacttaccaaattatatcataaagaataaatataaagaatataagtgtatcatgttctgaacagttaatacaaaactctaaaaatatacacaacaccatgagaaagtgatgaaatattttactaagttaataatagagatgaaattcagtcatgtgattcattagtaaatgaatcataagacacacttggacatcagcccaatgatcacttcagaatgaggaagaaatgagagttaaatttattgatctattaagaaaatacgactgtaaatccatatacgctgaacactgatatacccaggctgcctgaacaaatgctactggacacagaaggacagacagttccagacacaataatattgaatgattttaacacccaacttctgccaatagctatccaaacaaatctcagcaaaggctcttctgtggtcaaccctagaacagatcaaatgaacctcacaagcactaagggatgttctgtccaacagctgcagaacacattcatcttaacagcccatggaactttatcctaatggactacattttaagaccataaaacaagccttaacaaatataacagtatgtcaaaataatttttatttatcaaatggtaataaagtgaaatgataaatcaataggaagagaaaattttagaaactgtgaaaaatctatggacgttaagtgatgtactattaaatgattatttggggatgtttttaattcataaaataggagaaaaatgggggaaagttacagaatatttgggagtcaaaaaacacagctctaaaatcttatagacatgaatgttttcatttaaaaaatatagagctttcacataaataaattaagactgatttcagaaaagcaagggaaggggaagccacacccatcattcatgacaagaaggaaaaaagaccctgatgtcattcaatgaaaagccttaaaatgctgcaaagaaataatgaagcacggttatttccttgaaagcataggcaaaattaacaaatctttgcctaaattgactaaagaaagaaaaagacccaaattaaaattgagtccaaaaaaaaggtcactggaaccagaaagatggttcagagctataaagtgcttactgctcttgaagaaaacctgagtttttgtccgtgttgaatggttcacaaccaccttcaactctagctccaggatgatctcatccctctggccttcatgggtactgccttctaacctctacacatgtgtcaggccacacacctccttgatatacaatgaataacttttattatttttaaactctgtataatacattcatacaatgcttttgatcaagtcaaactcccattctcttctatccagctttttgccctgtttactgcatctctgaatctctgcggggggggggggggttgctttgttttgttttgttttgttttgtttaaatcacagtgagtccacttaatgttgccagtatgtgatcaggtatagaggtgtttactggagcatagatgctctctgggaggttgcgtttctaaagggaaaagagaagagaaagatgactcttccacacccagcagccacagaatgccaatagctgttcagcccggggtggatttcctccccactagcccctgcatgctggatgctgtacggcttgatcatttgcaggtcttgtgcatgcaatgactgctgctgagtcatctgtgcatgtgtgctgttgtatagcaaaccccacttcactgtagtcacctacctcatctgactcttaaaatcttcttagacttgatgtcccattcaggactgggcattccacactggttattttcttcattgacttgttttgagtctctgtgttaattacaataattataaaagcaagtttctctaatgagagttgagagatatgacaacctatatgcatgatgagaagtctttaggtcttaaagtttaggaattggtttaatactgtgaaccatttgcagagtacctcttatggggcaggttttaattcagctagaaaggtggggagaagggcagagagataaagagagagggagggggattggtttctcccaaaacactcaggccacgtttgcagcagatgcccagcttacctgcctgaccattattgtagttacagttcatttcctggtgtgactgatgactcctcctctcctcaaatcgggtacatcacatttccagcattacaaaagccagccagcggtcataaagctttcatgtcagttgttggaccaacttgatttctccatgttctaagactcaaacataaagagtcttcagcaatcaggtctcaccagcaacttttgtaggataacttaaagtattgcttgcattctctcacatatagaatccagggatgaagagagaattgaaagtaaaagggtgatatttatgagtatgggatgggagatgtaagagaaaaaattagttctgtaatatactactaaaaccaagttatgaaaatgataataattttatgtacagagaatgatgttcccattatcaccaccaagctttgctctctgccaaagctttcttctttctgatttgccctaccacatattttttgagaatcttctgtaagaggggtgggtatagaatatataatacattctatcctgtagaacttgtcatcctgggaaaggttaagcacagtagatatagagtgtcatttacaaagccaagtaagacagaagagcagaatggtttcgaaccaagtgctaagttctcacatttaattcaggaaacccacagcttaggtagatctctaattttcttagtaagtgataaataaattcattgcctgaccatactatgtggaaagaatataagctgagtaactgtaaataataacatatcctcaaataatttctcagtttggaaaaatgtgtgtgtgtatgtgtgtgtgtgtgtgtgtgtgtgtgtgtctgtgtctgtgtgtgtctgtgtgtgtctgtgtctgtgtgtaactgatagatctgttttacaactgccaatattaaaaataattttctttgcaaatgtcagctaatgctcaataatgcagtataaaatgttctggggctgagaaggtcactcagtggcagtgtgaattctgagtttgatagtcagccagtaagtcagaagcaaaatttttgaacatttgggtagcatggctaagattaaatgtaagatgtcatgggcaattttaataagaagttatttgttaaagattaaatagaatttactaagatttttgttaatctgctaccagggtacttcacttagcaaaagtgaagcgggagcaaagcttgtggctctgagacacacctggggtttatgcacatacctaggtaccattatatacccagacaagcctttacacaaaaactctcatttcttaatttgttgatctaattctgaaaaaaaatgtactattttgcattacaaatataattttatttacttgtannnnnnnnnnnnnnnnnnnnaatgtgtgtgtgtatgtgtgtgtgtgtgtgtgtgtgtgtgtgtcctgtgtcctgtgtgtgtctgtgtgtgtctgtgtctgtgtgtaactgatagatctgttttacaactgccaatattaaaaataattttctttgcaaatgtcagctaatgctcaataatgcagtataaaatgttctggggctgagaaggtcactcagtggcagtgtgaattctgagtttgatagtcagccagtaagtcagaagcaaaatttttgaacatttgggtagcatggctaagattaaatgtaagatgtcatgggcaattttaataagaagttatttgttaaagattaaatagaatttactaagatttttgttaatctgctaccagggtacttcacttagcaaaagtgaagcgggagcaaagcttgtggctctgagacacacctggggtttatgcacatacctaggtaccattatatacccagacaagcctttacacaaaaactctcatttcttaatttgttgatctaattctgaaaaaaaatgtactattttgcattacaaatataattttatttacttgtacaggtattagatttttaattttatttccaagaattaagcatactcttttgatgacagtgtgtgcatgtgaatgcatgtgcgagtgtgtgtgtgtgtgttttagaaactcatgtttaaaaacattgacaaatttggcaacatttggatgaataccaaaaatgttgtatattggtttgacattagttttcctaagcacaaagacaatggtttaatctagagctaagactgtgtcagtcttgcataaaatagcatgtctgtttagttacactgtaattaattttgctgtattttaattttaacatttgatttacttacaaacattaggaatttgtcatctttgagttagcctaattctccaacatcccttgcttatatattattttgtaagtgctttataaattacaggcaaaactgatcaatttctcagtccccaagagttattactgcgtaagttcatgaaatacagggtcaccacacctctgtacaattatttttccaaaatcatataaaataatgaacgtgacaaatgtctgtttttattcaatcagttatggtgaagaacacaagtattttttcattaggaacataagcagaaattttgtactaatgttcaaaactctgttaaaattatttatatggaatctttatatcttcagtcaaacatgaatgaaaccttaaatgaaattatgtgaatgaaaatttaatatagattaatcaaactttttgttaaaaaataaatgttcagatggtaaagtcatatatgtatgtatatgttaccactggttggggatttgggctaggtgtttccaaacatgaaccaataggcctcttaatctacagaactgaaataatggctcacacaattggtagagtattaaggggatattgttcaaggaaatagtatagtatagatcttaaagatacgtgctgtcaagcatagcagcaggccacatgagtgaagaaactgactgagttgggattcaagaagaannnnnnnnnnnnnnnnnnnnctgtttttattactatacttccgtagtactatttgaggtcagggatggtaacatcggctctcttctattactcaggattgtttttagctatcctgggttttttgtgtttccgtatgtagctgaaaactgtcttgccaagctatgtgaagaactgtattgtaattttgatgtggattgcattgaatctgtagattgcttttggtaagatatccatttttactgtattaatccataagtataggagatctttccaccatctgatatcgtcttcaatttcgttcttcattgatttgaaatttttatcataaagtctttcacttgcctggttagagttaccccaagatactttatatcatttaaggctattgtgaaaggtgttgttctctgatttctttctcggtccatttttttttcagttatatctaggagggcatactgatttttgtgagctaattctgtatccagctactatcctgagtgtttatcagaggtaggatttccctggtggaatttttagggtcacttatttatactgttgtctcatctgcagagaagttacatttccagtttgtatccccttgatctccttcaatagtcttcaaatactgtgttgaataggaatagagagagtggacaacctttcttgtgctaattgctttgagtttctcttcatttaatttgatgttggctatgggcttgctgtaaactgccttatgatgttgaggtgtgtccccgggatctttaatctctccactccacgactttaatcatgaagaggattagatttttatcatgaagagaagttagattttatcacacgccttctctcttttttaaaaaaaatgaaatcatgtgagtttgttctcttggattgtttgttcataaaatagatattaattcatattttccaatttaaactcttgatctatccctgcatctctggaatgatggggggatgatataattgatgtgttcttagattctgattggaagtattgtactgacaatttttacatctctattcatatgggaaaatggtctataaacctctttctttgctaggacattatgtggtttagttagcagggtaactgtgggcttgtaaaacaaattgggcaatgttccttctgtttctattttgaggaatgatttgaggagtgttatcattaactcttctttgaaagtctggtagaattctatgctttaagaccatttggctctgggcttttattggtttagagaattttaatgacgacttctatttcactgggggttataattttgtttaaattgcttatcttatcttgatttaactttggtaagtagtctatatgggagaaaattnnnnnnnnnnnnnnnnnnnntttctattttgaggaatgatttgaggagtgttatcattaactcttctttgaaagtctggtagaattctatgctttaagaccatttggctctgtgcttttattggtttagagaattttaatgacgacttctacttcactggggggttataattttgtttaaattgcttatcttatcttgatttaactttggtaagtagtctatatggagaaaattacccccttttagatttttcaattgatggagtatacgtattaaagcatgtccttatgattctagggattttctcattatctgtttttatatcccccattttctctaattttgttaatttggatattctttctcctctttgtggttaattggataaggggtgtgttagtcttactaatattctcaaagaatcacctctttgtttcatgggcttttttattggtttgtggattttgtttctattttattgatttcagacccaagtttgtatattttgtttttttatcatctattcctttagggtgtgatttctcgcattcgttctagagcttccaggtgtgctgttaagttacaagtacaaaatggctccaatttctttatatatgcactagtgctatgaatttgccttttagaactgccttcatgtgtcccacaagcttgagtatgttgtatattcattctcactcaattctagagaatcactactttcattagtagtgtcttggcacatttatttcagtcatccgtgagtttgcttcaatttctgtaatcttgtaagcttctgctgtttccctttgtcgatgatgatatccagctttaatccatggtggtctgataggatgcaaaatgttatgccaattttcttacacttgttatgccatacactgggtctgagtatatgttcagttttggagaaagttccatacagtgctgaaaagaagttattattttatgtttgggtgaaatgttcagtggatgtcccttagttccctgtgagttatgatgccagttagatccaacatctctctggtttagttattgttggaatgatctgtctattgatgggagtcaggttctgaagtctccctatatcggtgtgtgaggatcaatatgttatttaagctgtaacagtgtatcttttatgaagttgggtgcttttgtgtttggcaaatagatgttaagacttgtnnnnnnnnnnnnnnnnnnnnatagcattgaaaatgtaaacgaggaaaatacctaattaaaaaaaaagaagaaatgcacacttttttagttttactgtaaaaaaaaaaaaaaaaaagaggctctgagttcaatttaggaacagtgccaaagaatcctaagctgtttttcttctagatagaatgagtttagacttatttatactgcttgtttgcatcaaatacttttatgcatttaatatatatatatatataatttaataagctaataataagaattatagaacctaatgtatttattctttttttttcactatagtggattgattctccagcaacagttggttttcgtagccagtaacattcacagcccctattgagtaagatagatcccacaaacaggcaagtcaggagagagaccaaagctaggttttctcaagattggattgatggttacaaaaccatcaggaagctcggcagccatgcaggaaatgatcatctgagagcctttagaatggagtgaaatggattcaaataaaacaaatctaatcaaggctggtaatccagtgtgaggaatgagtcagagaggggagtgtaaggtgtgagtttgatctctagactgagcaacaagatggtgctatgtaggttgactgtggtggggattgcagaaaaggagtgagggaggattctacactcagtacttgatgagccaaatttgagttgcctgtagatatccaagtggggggtatcgaacaggcagttggctgttcaatctgcatatacataaactaaggctagtttctatctataagtctagatatcatctgtgtaaagggtctgatgcacacaagtggaggagatcaggtacaggatgtaaactatgagcatgagtgtaaagtccccctacagcccatttgaaggttcaaaggggaaggaagaagcaataggaacgatctggaataaccagtaatgactgctgaagagaaaaagatagcaatatagtctgaggttgatacagtctgagtctcaacctgataggttgagaaggaattcttgtaataacaaatacctataacagccaccccagagacatggctttcaaattaatgacacctaggaattcctggacaattttataatctgaattttaagtgaacaaatattttcccctcattacttgatgagactaagggaaatcattcagtactatatgatactaaaaggtacacacataaagacacatagctacagctaatgacaaaatcatgtgctttctaaaaagatacaaatctactgtcaacaaaaccatagttttgtttatagaatctaaatagttaaaaggtaccttttctgcttacaattatggttattatccatgtgtggtactttagcaattacgggctttcagtcataagaggtttgtttattattttgttttggttttaatctttcctctgcctcagaacttcccactacccttttcttgaaccaggtcgaaggacaagcaagacaatgaacagccattttcatcattaacatattgatagactaaccttggaagggctcaagtgacttaaccttgttttgtttagtccctgaaatgagggtcagtcatcacgacattctttcatggcagacacacttgaactagagtgttaacatgtgttcctttccccccacagggctccataggaatccaaggtccccagggtccacctggaaaagaaggccaaagggtgagtagagttgaaacagctggtatagtttgccaacacagaagacaattatttttgagcattaaaaagaacaaaataaatagatagcaaacaggtgggcatagggtaccagctaccaaagacagaaatagaaggttagggattttgacagagtattaacatcagaatagtctacatgttttcgaaaatcagcagcacaaatgtacggaccattatttgtataaagtcagttagccctaatgtagtctagaacatgttggccagagttcccattcttgagttaagttaatgagcactgcagtggaagtcccacctggacacacattctctcaaaactgtagatagtaactaggctcttgacccaaattaactagctgacattagagactctttgaaacttgcatttcactatttgttgattttaaccaagatgaaacaggcaataaatgaatctcagcattaattggaaataccatcatgaccatctctcgccagagctgagtctttgtgtctccagcaaaaggaagccctgaagggttctggcaactggtgtgcttccctgggactcttgacacaccatccttgggtcattctgtcttcagttgactctggagtcttgtgtttttatacactctctcgtatgattgcttatgaagtccctgtgctacataaagcagccagtacatcctcaactctacaacagtgtggatgaggttcctggaacagggtttcaaatggcttgacttggctgctgaaatagagggcaagagttccctcgttgtccaactgtactgtaaatcattctcattttctcatagcaatctcatttataccttctgtgaaggaaatctatgtacttcaaatatatcagtgtacttcaaatatttgaagatcaatttccaaaggcttgcctttgattttttttccttcccttttttgggttcctagtcccactgcagtctagtaatttgtcccaggagacatgaattgacctcttgcaggaatcaagaatgagacaaaaatgtacagttcaatatggcaagtaggccctctaccatggacagtagactcccaatgcagcttaagagtcttattatctaggaaggaggaagctttgggttgtcacagtgtgtgttcagctaaacactaccctcctttgttttaatgaaaacatctacccagtcatgtctttcctggtttggggttgtcttatatcacagtgttggaacaagccatgttatttttcaacatctggaacttagtctctattattttatcatttgggcattattttcttggagttttgttgttgttttaatgtatgtgaatcttgttctccagtcaaacagctcccatctttatactattgaaatcattaataaattctaaacagaaaaggacccgacaaccagataccaatagcctatattttatcatgggctcaaggactgctaatcaaagtatgtgcaaatgtatgtgaactctacctcctcctcacccacatttcttaatttggtttgtaagataattatgagaaacctgtcagccggttgctgaaatgagaaagtattcaaatgggaatgttttcaaaacacacttcaaattgaaattgtaccttatcaaagcttgtatttcagaagacaggtcaaaggataagtgaagttgatgtatttttcataattgcagaggcaattatttgaactacatatctcaatcactattttaatgcaaatataccctacttataaacgtgcgtagtccagaatattttataatactttttattttattttctataaagagtgaccacatcagacagtaatataactaattttagagttattgttccatataatttgtccttgttgctatctctctcaaaaatgccatgcacttcaaagaaaataactatattagatattagtggcattattcatgtttaaaaaataatttctgaacattttcaatgatgtctctaattatgtagctacttaaacaggaagcgaattaatataaggaatgcactcttgtagatttgcgtttatgtccctaagtgtcccatttctcctcctcatgagagccaggtttgaatgctcctcaaaactcattaactgtatggatgggtaaggtgtcttaatgcatgcacacacacatgcatccacaaacacattaacatgcatacaaatacacacatgtatacacaccttcagaaatagaccaataatttttctatctcattgaattttaaaatagaatactatagaaaaatccatgactgtaaaaactatattgatccactgtcaacaaacatgtatattttgattgcaggtgtttgactcctgttaaaattgttaaaacagaatataaaacacgtggcaagtccctaggacttaatttctaggcacaatgtctttagtgaaagatgtttaatggtagataaagctttaccttcttattctccctccatgataacacacagaacaatatctcacaattaggatacgtttataacacagatctcactcacataaaaccatactttatgccagggccaaaaagtgggagtgggtgggtaggggagtgggagggagggtatggggggcttttgggatagctttggaaatgtaattgaggaaaatacgtaataaaaaatatatatataaaaacccatactttaaaaaataccgaacattgcagaagtgtgcaagtattgctgcagttatttttactaacacacaaaattctagttgagaaaacacacacacatacatgataagaagacttctatatattcagtgagaacactgcttttgtgggtacttaaacagaacctttaaatttttaattagtttattttatttgtctcttaaagctgttagatgttagcttacaaattattcatttaataaactataaaattaatgttctcacatttaagactgatcttaactttgagaatattcttactgtatgttttcttgacctgattttcatcttgttttctgccattaaatatttaaccttaactttttgaaatcttgtaagtaaaatatttgactggaacttttaatctttctttggagggaggaaggtgtcaagacaggatttctttttgtagccctgactgtcctagaacttgctctgtagaccaggctggccacaaactcacagagatctgcctgcctctccccccacagtgctggaattaaagacgtttgccaccaccacccagcggtacttttaatcttatacacgttattaagcaatgcgagtgttagaatagctaataataaacaatggtcttatactgtggattcagtgtgtttgagagtggtgagggcaggcaacctatgtggaggcctggagactgttcagctcaggatgagaacagaggagggagcaggaaggtacccaggacacagcagggccagaacaccaaacgagagcactttaacagttatggagaactcagtgggagtaagctcacatcaagggctacaaagatgtgacagttgttgataggggatattattcacttacatagcccctattctaagctcataggagtcccttgctttgttcccaggacttccatggtggctcaccaaagtgcaattccaggtcaggggtttgctctctaggagctcccgtacacacacggtacatagacaagttacatgaaagtgtgcacaagtacacacacacacacacacacacacacacgcacctacacataaacacacatgcacgtgcacgtacacacatgcacacacacacacacacacacacacacacacacgagcaacaaagtcatcagagaaatgtttgttaaaagaagccagcagaagcagtgttaattgagaaagaagttttaattgatcaatgggcgaggcattagaagagaaaatgagagaaaggggggaggctaggaaattagacagccaatggtgaggtggcggaagtggcaacaggaactgaatggaagcccagaaaattatcctaggaagtgacatagtttaggtggtagatcacgtgttcgtagatgctcccacaaaatagttcaggagagttgacttggatagattcctctgagacacagattccctgtggacctccttataatggaatatttcaaagtatacagagaataagtatttaatgcaaccttctacttttcttatacacgtgttgagttcatgcctaaacaatatcagtttaaatgtgaaactcatatgtttttaatcaaaggaatcatgcaggtctctttttttaaaaatgaacatttattagtgagttagctagttacccaactaaaatgcactttgcatggctatacaaagatcttgttcttgttatctgctactagaatctgattttaatattggacagaaatacacttaaattttctacactcttctccatagcccctttagtcataacttcaggttatcctgtgtgtaggggagctggggcctcagactttgtcttacaggtaaattgtacttacatataaatttactaggtttttcatggcaaacactgctttccttctttgcctgtgtctgatctggtttatatgccttaccaatgatagcataaataacacatatgatgttctgataaccactgggtttattgataccactagggcaaaggacactaaaatcactgcttccaggaacccaacagatagtgcaaaactcattcaagcaagtttttcctcaagcccacttggttgaatttacaagactacatatcagactcaatgtaaatgaccaaatctgcacacattcccatattccattttgcacaattccatagcagtcttttggcacttagcatctcccacatctgcatcaagtagagctgctgaagcaatgggttaggacaggaaggcagagagaatgcccatgtctgttaatatcaagtaaatatcagcaaggatacagttgggtctcagcagtaaacatgctctggatttgcttcttgctctgtgcctgatgggaactataaatccaacaaacaagatgcaggcagacaatatctagctcagtctaattgaagaaaggtgaaaggagacagcacaaggcatggactggacttcttgaataaaggccatcctgtagatcaagttaaatgtcacagctacttaatggcagtgtgtctgtgggccattgtggtaaaattcactctaattagtggtgctggacatgaatttaaggcaagaaagacaaaatgttccaagaagggctggcagtgaggaagaaaaatgattgtagcctatggtgacaatccaatacttatgtagacatccaaggcacaatgggccaggtttctcacatccatttaaacaaagggacaagtgacatgatttgtagtacaataagatgactataaattatctccatttggtgattagcaaagaagaaccatttcatagtttgtgaatgggacactgcctatgaatagcatgtttatgcagatctatataaaagctgttctatgtcatggaagaaccataccatggagccttcgaactgaagacatcctgactccaatgtccagagattctgacagcttcagagggattagcctaacagaagggtagcaggtcccagaacattgaataaccaactgtagagcaaacatcaaaattagagggggaaaaatggcagggccattccagcccatcaaatgaaactgaagccatagaaattcaacaatgttctaaatgaggccacagaacaagttatatattttaacataagaaaaaaaatactgtctattctgtggtcctgatagaagcagaagcagaagcagaaaaggagaagaaaagaaggaggaggaggaggaggaggaggaggaggnnnnnnnnnnnnnnnnnnnnnnnnnnnnnnnnnnnnnnnnnnnnnnnnnnnnnnnnnnnnnnnnnnnnnnnnnnnnnnnnnnnnnnnnngaggaggaggaggaggaggaggaagaggaggaggaaaccaacaacaacaataacagcagcagcagcagctgccacctagatttgcatatctttaaaatggagactattgagtttttaagtgaagcactgaccaaagatccactttaaatttcattcttaagaccacacatcgaaaggaacaatggtgccgttgatcccttctggtctccacacagagaaacgtgcacactctctccccatgaccagcctatcttgtcatcagttcataaccagaattgcctggtcagtgtgggaaaggatgggtggctgtcagagtcaacctgttccagctgtggggttactttaactcataactgcaggcaaactgcttcaaattctaatgtaaattagttttatcactacttagctctcaggtatattacagaactaagcctgagacaccagagaatattctttggtgacagatttgtactgaagcatcctataactattacctgcttacccacagatgcacttacgggggaagggaaggggaagaagcgcttgctttgaagtgagctgcgctaaccctccgatgtcactgccttactgcatttaagtcatattgaacacctcttttagctttgccagggtaaatgtcaaccaaaaagttttttgccatttgagaagctgtgaatacgggtgtaaatggctgccaacaccaagcacgaatgtaggaactacaaagagaattttaaaaatgtaaaacatgaagaacgtgggacatgttttatggcgtaatgatttaaaaggcagaaagttgcagttcaaacctcagctttacaaaactattgcatcttgggtaaccttccagaaacaagggaattctgaaagcaagtttaatgcttttgtcatttgcaacatatgataaaattctcaagagacagcagcagttgaaaaataaatgtgataatccaacagttgaaagatgattggacatttctttcccacaggattcacggtgcaccttggtcagttctgaattctacaggaaaagctaatgatctaccttttcttgttttccttgaaaatggttaacttctgaatttttcttattagaaataatggatacccacttgatatttttaataggttaaagcaaacacatccataaatgtttgtactaatgtgactgtgttcactggtagtctttatagtcactacagtgtgaaagagatgctgcatagctttcatttgtgattccagaatccaaactgcatgctaggcagcatctatctcatattgtatgactctgtgtgtgtgtgtgtgtgtgtgtgtgtgtgtgtgtgtgtgtgtgtggtgactatatgtaaatgctgcatatgctcaattaaaatgacactttaagaaaaacagtgcttggagtgtagagatggctcagccattgaaggctagggtctcagccaaaacatcaagacaagtaactgaaaaaagttacaaataaataaaagagcattgaggaaaatgattgcatgcgtctgatcatgtcttcacactttcccttgatatgtttttgtgaagtgttccatagaaaatatttttaaactttaatacatgtatttggccatgttactaggttcttatctttagcacatttgaacatactcttataaaataagttaaattaaagtctgtacactgaggggggaggggacgagctaggtaacaaagaggaagaaaagatggggatgtgacacttgaattgctgtttggtgtggcaagccatggaagttagcttgcctggggttccttaaaagcagagatatgagctgtccttattcaagtcactgactaaagaaacatatgcacaactgaagcacacagagaaagcaagaaatatagaaacgtgatttcaagaagagtctagaatcagtctggttccacatggctctttggggcacaacgaccttatcccactttgaggtaaaaggttgggcttcctctctctgggttgaataagggcaataattccccaggtgttcccccccccaacaggatgttcctcaaaactaaagagacctgagggaaaggttcatttagaagcaaatatctaattaaaaaaaataaagtattgaatgctttgaaattttttgtttttatgatcaaactctcctcgtcagtaaagtcaataagtcgtttcatagccaaaaaaaaaaaaaatagtagccaaattccaccaaccaggcctggctccaaactatgaaaaacagacgtcagtgtcagctaagcagaatcggagggcctctgagcagaagcaggcactatggtaaatttgataatcatagattcacaggaaagcggaagtagaaacctatgcatctttttagatacatagatgaaagaacataattattacataagcaagtgaaacagccagatgctgcaaacattcagaaaagccaatgaacagagagagacacaacccaatagacttaagtaccactgggtatttagggttgaaaatgtctaaaaatcattatatatgtgtgtgaaacagacattgggcaaaaaaaaaatgttttaatgatgactgaactaacaaattgaaactacccatagtgcctttgcctaatgtaggaaacgttaaaaggaaattgtctttttggagatgaatccatttaaagtttaaagttaaaggacccaggcatgacgagcacctccagctcttaaaacctggcttgagcagggctggagggatgactccatggattagagcactggctgcttttccagaaaacccaggtttgattcccagcacccaccgtgtagccatctgtaattccagttcccggatgaaatgttctcctttgccctattcaggcatcaggtatacgtgtgttgcacatacgtacattccagcaaaatactctatatacctataaaataaaataaataaatatccaaaagaaaatattttttaaaattaaaattaaattcatctgatttctcaagaaggaaggacaaatttactatcaggaggtctccagagatagcagaatagtaccagacagactgcaactaaaggacaggcttcagaaaaaaaattactggggacaggcccttgaacttggggtaactcctacatctaggagtagataaagagacccaacttgtctgagttgatgctgccaatctttagaaagtcaggggattactgactgtcactttcagaagctgatatttatcttgtccaatttacatgtttgtgtgtaccagagtgtgtgtgtatgtgtgtgtgtgtgtgtgtgtgtgtgtgtgtgtaccagtatgtgtacatgtgtacactggagggtggatgaaggatggaggttgatatcaggcgccatccttatttattgaggcagggtttctcatcagatcaaagcttgcacataaggccgatcatgctagccaactgattctaaagatgctatctctgccttcagagactagagttctgatccaccaagacttgcatgcatttgaggattaaaattctagttcctgtgcttgcaaagccagtgcattaactagtatatcatcttccttgccataagctggaatttaaagagaaatggctcaaggcaacgtcggggagacaaggacaaagtgttctcttgtattcaaatgacattcacaaacaaaggaagaaaccactgaacagggagaaattaaagatataagcctcctgaaacagcagtataaattgggtaggtgtccagagaaagttgggaaagcataagtgcagtcaggaggacccacaagaaggcatagagcagcggatctcaaccttcctaacaccgtgaccctacaatacagttcctcatgttgtggtaacccccaaccataaacttatttttgttgctacctcattactataattttgctgctgttatgaatcataatgtaaatatacctgacatgcaggatatctgacatataacccctgtgaaaggaatgtttgaccccaaaagggatcacagcccagaagttggggtccattggtatttagggatgtgagcattcattttgggaacaagaaggaaccaaagaaaatttcatcctcatgatacatatgtatgtttgtctcacatagaaaaagaaataagaggagatgggacctacaaaagtctctgctatttatgaggcatttttatcatgactgttaaaatagatataccctatttcattcataaccaagcccaggtcagtgaagaaaagtcagagaaatatacaaatgttgagaaggccaaggtaagagaccagagaaaggctggtcactgagggagaaaaagatctgtgacatcaattcagagtattgctaggttctccaagtttctagtgacgtccaggcactccatcgtaaacaccccatggatgatggtgctttcctacataaatttccagtgatacctactgtaaaaatcccttttatcagctatcttaaaacaaaacattagttttgttttattagttattgatccaactcagaccagttggatctccttatctacttctagaggtagaagacagtctaaatcttttagaaatttttattagtaaaatataaattaggtaagggtaaaactgtcagaactaaattattcttatatttattgcttctggaaaatttcacatcttatatccctgtaaacattctttgaaccctcattttcctgaattctatgtaatctctgaagcatgcagatgctgttaaccatgctaggaaaactcaggagacccatttataccacaataagtctttctcacgcattaaaacaatgcattattgaagttatggccacaaatttgtgtgtgctatgtgctcatgtattataagctggcgtgcttttccatgagagctgactagatggatgttgtatactcctttgcagttgttggccatagagctaaaaaaaaattttcagagtaaaataaggatgaaataaaatttcctaatcttctcatgtaagatttaaatggtgtactgcttgttttctttcttattttgttaaaattgtgtgaccagggtgtgcctaatttacttttattatacaattaatcatctaatgaaaacagaagtaatctatgccatttgtagaaacttttatttttaatcttttattcttaagacaacattcctaattattcccccccacacacacctctatactcttttatattttgctactcaagttcaaatataattataatgagtcttctttaaaactatttttctgctatatcactttcaaaagttatgtagatttttagcaagggcacaatttttaaaaaaatgaacaaatctatgaaactttctcagatcttgttattcatgatcagatttagagagtgtggtagactcctgtaagacctcaaaccataacagacaggaaatatatgacttggagccatttctttcagtatcttcagtatgattctattaggaaacattctataccatcaccttctaagctacatcaccattaagactaatatttgtttaaacagggaagaaacacctaatggtaaaacaatggtcatggaagttgtgcctacagaatgggagcaataggatcatgcatcagtcagctttctcatttctgtatcagaatacctgacacaaactatttaaggggaggaagggtttattttgactgtggattcagagagttcaattctcttaggttctattgattcttggtccatggggagggatgtgtgacactattcctgggaaggcatgtttcatgggaagacactgttcatgggaatacataaatttgtgctcacctcatgatagtgaaatgaggacagaccaaaatacaaatagcaccaaagtccaacttggggaaccaatgagttttactggggttacttacaggaatatagttgggttacttagagaggtgactcaaggccagctgtatcaccaatgccaactcatacatacactcataaaacctggaacctggagctcactacacaacttacaggcagctcaataagatgaagactgtcctttccaggaggctcagttggtcccagcattttttcaggcagctctgcatccctgagtggccagcctttctctgctctttttctttggccttcccaacatctatctatttctctgtcttttcttcactgacttgggcttgtccatggacaaaatagacattaagctatcttaacaatcatgataaaaatgcctcttataaatagcaaaaccttttgtaggtctcgtctcttctcattattcttttccgaatgagacaaacatacatatataatataaagaagaaatttgctttgattccctcttgtccccagaagttgtacaccaagatgaatggttttaatcttgggaaaacagctacaagacagggtggcagaacatcctagcagtaggaacatgtggaagagtcacctgtcctatcacagatgggaagtagagaagaagaggagaaaagtcttactagatatgaccttcataagtacagcctctgggttttgtgtcctctaccttcctaaattagcaccaccaggaaacaagcaatgaattcatccttggaggacacttagatgcaaccgtagcagacaacataggaggaaggaggacaagaacagaccttagatatctgcacttccttaaagttagccctatgtttgctttcttcaaagcctggactgatgtctgcctagtccaaaggaactaggagaattaagaggaggctcctttctctctcaagtgacaggagctgggaaaccatccttgtagtgtaagtggagttgttgaagcgtggtgcttaggaacccataagcaagctgtggggtgtacagaagttgaatatgcttgtttggaacctttagtaacaatggactataactgtatagtttcagcctgtgatcactggactctcctggcaacaatccttcaaggagtagcattgagctcatggggagttacagcttctgttggcttcctctgcatcataaaacagcaggtccacaaacttgtggcttttattaaagtaaaggatcaagaccgcatgccctgagaaaaatgtgatcatttgtttctgtggacttttatggtttatatcttagtttatttacatatttaaattattagtctatctttcattatatatcttgtactcatgttaaagatggaaagtgtattttaatcctaattttcaacaaaacaattttcactaaatttctttacatctcattagtagaaatcagctaaatgagaaccttgcaaaaaaaaaaaagtctaaagaaatctagaccaaattaagtctggttttcctaggcagtatgattaaacatatactgaatctgttaattgatggagaagcattatttcacagcatgctatctgcagttgtgcactgggtaatgaggcagtagattcataaaaaaaaaaagttagcaacatgtatgcataaaacttagatataaatacaaagcccaaaatatttctaggaaaacaaatactgattttaaaatgccaattaaagcaaatgtacactatttcaaacacaaacattagtattttcttcataattttttaatattgctgcaactacaaaagaaacatacagtatgctgaagcaattgtaagcaaaggcatcaaagatgtttgtttggaattgtgacatgattatgtagaaaaactgttgtttgacatagacaaaaaccaatgagtatcaatgtgggaaacaaacaaaactcatgaatcgtgttcagtgcattttgactaatatacaagtagcatccatggagcacttcagaatgaccgcaggggatggtggtggtaaagagctttcctctttagtgaaatgcagacaactatgagagactacactgccagaaaatacaattaggagctttactcttgcacaggactttgttctggaagtacagctgtggggatgtgtaaacttctcgagttgtccccaagttcggttcccagaaaccatattgggtgattatgacatgtaactccatctttaggtgacccaacatgctccttagcctacacacacatacatatgtgtagacacacacacaaataataaaagatttttaaaacctactaggtttttaaaattattattacatttttaaaaattaaatgtaaacatctagaaatataaacatgccttgtttcctattttctattttaatatcaatatttccatgtaaaaataatgcaatgtggctatcagtggcagaaaaccaattatcaaatagtgtgttaatcatggtgttttatatcagtcaaacattattaccaaatatacttaaaatgtgatcagttgccttaaattttacatttctcaacaaggaagttttgtatgtaaacattacagatagccaaattcatttacatgtgggggataaaatttaatgaagtacactatcataatagggtagattcctagaactagctactaatgaaaacctgaagatgaattttgaaaaatgcaatatcacttttcccattttataaaagtgtaacttatgaagatgactctgagcttgtgaagactagtttgaaatttctttttccatcccctttgaccaatgctactcatctcacgtatccatgaatacaatcacatactcgtgatgccaaaacatagcaatgaagctcttgggataatgagtacagcctataagaagcactgtcatttcaacttggtctggaaataatagaaagcacaaagcaagctcatttttaaatgcaaaacaattttgttcagttaaaactgtttttgtttgttcaaagtgtataatagacattttatattggaaataagtgtttcactcataatttataatcaacgtgcaggcatatattcattacacatattgttgggctttatatagacattttcagtcaagactttcattcaagacattttcgatcatgttctttgaccacattccccttctgatatcaccccttccccatctcttctcttgctattccattcattccccccagaggtcccttcttcttcttctatgatgtgtgtgcatgcacgttcccgtgtgtgtaattttatgaatttatataagatccacaaatttacaatgtatttgcctttctaattcttctgtgtctcttaatatgacaatctctgcttctgtccatttgtctacagattatttaattttattctgctttatagctacacaaaacttcgctgtgtagatgtacaaccttccctgtatccactcatctgtttaaagacatctaggctgattctacaattgctactgtaaatagtgctgcatgggtcaattttggaagttatgttcccagaagtgagtcatatgataggctttttcgcttttaggggactgtccaaactgattcccatagaagcagcaccaattcacattcttaccagccatagggttccctgtctatggatccagcatttgctggatctgttttctttatgataaccattctgaatgagaagaaataatatgtcaatgtaggttttgtagattgctgttggtatgcagctgaggtcaagtgcctctataaagctagagcctatgattgggcaatgtaaaaggaaggtggggctaagagttttagggagagagagaggacaggggacagatgggagaaaggcagagaaagatggagaaaaggatgaacagcatctacatggcttgaaatggccacaggtagctatggatatcatagaagagcatagaatattatacggcaatttgttcaatctaggtgggcagcttgtatcaatatcaattgagttttgagttctttgtgtaggcatttgggggattgagaatttactgttataaatctgactgataaattacaggcctctagagttttctttatatggtgctcgaggttgagagcaactcttggccgactgaccatagaggatggatgactaggaatgtaaggaattcagaggcaaggaaacagggaaaattgggtatagccatggggtggggagaccgctattgttggtgagtagctggagatagattgatttttaataattacacacaaggtttaatttgcatttcctaatggctaagaatgttgatcattttcttcctgtttcttgtctatgaacacatcatcgtttgacaaccagtcattttattagcttgcttactaattgagttgcctggatttttttcataattagttttctagttctttatatgttctaaatttagtcctctgtcagacatgaagttaacaaggatttcctcccattcagaaagctgtcttttccctcggttaattatctcctccactaggcagtagtgctttattttgtttgtttgtttgttttaaatgtcatccaaatccatttttcaattcctacttttatttcctaagctatcggagtccattccagaaaggtattgatcttgctcatatctttaagtattttccatattctgtcatctaacaatttcagagtttttggtcatgcagaaagaattctgactttcagaaaggtgagaagaggggggtcttagctttatttttctacatgtggctatgctgaatttctagcaccatttgtgataagattctgtttttttttctccaatatatatccttagtgtctttatcaaaaattaggtgggtatatacatttagacattttgtgtataaatactacaatctatacaatttagttttatactaactaagataaatgtgtacatagccaggtcccctctcagaatgaaccaatagaatgtgcagtatactcttagctgtgttgtatgttaataggatttagaatgccaatagccatatgttcaaagtaaggctagtctgttctattatccattctcctttattctgggtgactcagaataattcccttcgagtatccagctatgcaggaccaagcaaccactgggtctaaaagtggtgttcagatggaatctctcaaaagatcttttaagaggaaataggcattcactccttcattgtttggggtgttttcctctaaaagatagaacataaatgaccagaacaggtaaagtgtgaatagtctgacttctttctataagatctgaggatttgtattacacaaagagcttaaagagatgactcactgtgtgacttcccagaactgaaataccttaaagctcagaaaaagtctgaatgtgttgggtgtaatgcaaatagccaagaacttacagtctccaagacatcccgggaaggatttgtggggggaattaactcaaaggcagagtttagatttatgataactggttatttttaaggtagggcagacatatctgagtttagaataggtaaatctgtctaaatcataaaactgaaatttttcagaccacttgatcgatgctgataacacatgcaacatgagcaatacaaatagcattcacaacatgtgactttgcatttccctatatcagaaactcttctgtgatgagagttaatatttccattttccacacaaaaatgctgaaacataaagaagttacggatactatgtttgggatcacagagcaagacaaaagtcagcttataaccagttcctcctgaccaattctgttcatacaacagctaggttttccaagatgttttaatacataannnnnnnnnnnnnnnnnnnnnnnnnnnnnnnnnnnnnnnnnntagcccactttggagagaaccctgattcattcttctactgatcctttagaatcactttcctgctttcctctccccctccctcccttctcttcccctctccctccctcctcctcccttctccctcaccttctctccctccaggcatacattcttcctttcttcctttcttaattttgatattttagaacaaacatagggtctcatgcatactaagtatatgtacattgttccattgaaacacaggcgcatacacacacacacacacacacacacacacacacacatacacatacacacacacatacatctttgacactttttctcttcccttacctagagtttaggtgctgcagagtggtttgtgggggaaggaatgttctgtactatatgccaagggctttcttggagcccctccccagcttcaaaccttgccaatagaaaccattcatttcataacttagtgctttctatggcaatttagttatttcaatttttactaataaaacattaacttatgtacaatttccacaatgtaaatctcaaagggcatggattttcaaggcatatagacctagcgtaagtgcagcttccaggcacaggtaacatctcctatcctcatattgtgtcagggtctcagttttacaataattacaaaacatactaattaatattaaaatattaaacctggaactatgactgggaatatatatatatatgtatatatatatgatagcttatatattatagatagcatatatatgtatgcatatacatacatgtatatatgtaaacataacatacatgtatatgtatgtatatatatacacacacacatacatagagagagagagactgatattggtgcttataagtgctagctactatatcagaattactacatttaccactaactagagcacagtgaaatcctatagcatgaattccagggaagttcagtggctcacatagactctcagagccatttctggatctgtggctagcacacttgcccaggctactctatgagtaagtgtcactaaccaccaaatcgttgggaggtttgaatctagccaacagtggtcctcagggtagggctaaagctaaatgaagaatgagagttttccccctaagtcccagtagctctatcctggcccctgactcattaaagccagttcgtgcactgccctgtggaaacttacaggtgctgttgggtgggttttccacttactggggtgctaaataaatactgaccatcatcagttcccccagaaaactaacttatatttagagctgttactactagttttgactcttcttttggtcatcagacagacacttgtaagaggagcagcacaccaggactaggttatttataacacgggatgacatggaattttcaggaatgttttatggactacaaatgcttcatccagacttctcattcttcttcccatgccttgatgttataaaatatgtcaggaggaattcttaaggtcaccatatctcaaacctcttagaactatacactgtttcaaacctctaagacacagacttgattatcagaaggcttagatttaatttcagctcactgtttgtacttagatataatttgtaaatgtttgctcttatttttgctgttagagagaagtgccacaagatagttggtttttgttttaaaaagcagttggataaattaaaatatttgaaatggggcatcctgtcagaaaacttaatgtaaaattgacattacaagataaggtttttcttacagaggataatgatatgttgcttaattctcctatctcttagcttgttagttcttatattggataaaacgtttgatcttcttagtgtatcccagtacagatgacttcaaaagctactttaaactttcacttagaagtaagggcacagtaacttctgtaccctttacttaaggataattcctttcagaaatgttgcctactatcaatggagttgagcactggcagtactttaaaatattgaaacacaaggataaatattaaaacataatgcatagtatgtatgatatttacataacccagaagagtaccaaggaccagaagaataccataaaatgtgtgagactcattacccataggcagaggaaataactcttcatttggaaaggatttccaaacaggcttcctggacatattgcaatcccagctgggacaataaagatctgatattcaggttatctgataatgagtttgaggataccacaggcttcatagtaaaactttactgcaaacaaacaaacaacaacaacatttaaactgtggaggggggctgtttatttttaaagaaatttaagaaactattctgaaattatcactatttatttattctatgcctgtggaaatcgtatcattgttatgttactcattttgaataagctatggtttttaatttgtcttgggaagataatttcaagaaaatttacaaaggtttatatttactataacattaacaaaaatagcaacataaacatcgctatatcctaaagatgtttcaagatataattaatcttccagctttgatgttgatgcttgtctataaagtataataatgagtgcaatcacagctttcctcattagtagaagctcatcatttcagaaagctatattcacttctattttccttattagctcagaccaaaagcaaaaacaaatatttaatgagcaccaattacattcccatacattgcagctagagcaacaaacacaacaagggtgcttaactctttgctgctgactttcataaataaagttttattggaacacgtcaatgcccttttttgttcatgtagcctctttggttgcctaacagtagagatgaataagtatgtgaaagtgtatgactctcaaggcactggttctcagtcgtcctaatgctgtcaacgtttaatgctgtcatgttgttgtgaccccaactataaaatgattccactgctactttataactataatttggctactgttgcgaatgtaaagatctggtattcaggatatctgatatgtgacccccaaaggggttttggctcacaagttgagaaccactactctaaggctaaaatactcactttcttttcatccacaataaacgctcccaaactctgtgatatacaaaagcttttgtctttcgtggcacccattctaacacagatattcacaaaataagttttgtgtgtataacagtaagaaacaaagtataagaaaacagccggagagacagttggtattgggaaggaggcatcagagaaagtgtcccagcagagatgactgctggccaaagatctcacagaagcaaaggaacagactccgggggtatctggggaaatctcttcagcagaaggagcagatgtaagctttgaagctcctgttgaagtgatgacgttctttattaaaatataaaatataaccacaaccaataccacatatcgatagtatgtcagtgtggggccattgctactttagccattcgtgttgctgtaaataatgatggacaacttggctttttgtttgtttgtttgtttccttaacttacttacacagggaaaaggcatacagcactaagaaaaatacacactgagattataaatgtgtcaatgactggatctatgtataactttctatttaatctccagtaactgacatatattcttcatgtagtaaatgcacaaatactgatcacttgtgcaatattttctttcttatttccctactcctttgtgttccttattaccagactgtttctcactgaagtagtaaacaaatctgtaattttgattgttgctcacattagcttttatggttttcattactcatgatctcaaaagtgtgaagcttctacttcaagagctcaaatttctacatgaacatgagaacatgaccatgtaatactggaggctttcacagactacacactgaattttccattttgtgtttgagattttgacaccaaatagatttcacttgcctgtattttgaatgcatttaagtcagattaatttttttctcaatactaataaccaatcatttctactgatgagtggtagttcatgttctaccacgatttgtttaacctgactctctgtagaacacctatgtcatttccaccttggggctgctatgcacaaatctgccttgaatatgattttttaatgttgaacacgatttatctactatttgagaagtgcaagcgtattgatcaggtagataccacccacgacttatctactggcttcttgcacaggatgtacacaaggtcatgttagccaatattcagcatagataggggaggagacagggtggcactctagctggagcactattggcagtgggtgacctctggggaaaggcaagtcagctttcttcgggaatgtggcctctggtaggttcccatgttccagtgaatgtccctatcccatgtacatatggacagctctcactggactcagtggatcataaagaacatgaaatagaagaggatgaatcaggctccattaaagtgactttgcagattggtggtatactactatgtcagggaaagagagcagcatagctttctttaaaccctcttcttttccagtgattggcttccccagacatgatcctgtgtggagggctatgtctatcactaacctctcagaattctcattagcaacttcactgagacctctagccattatggggcatctgtctcctgaaggatgactctgcttccctcgagttcctaaactacaggctagtcagaaagcaaacgagacagtaaactacgctttctcgttccctacatctggcttaagagtccttttccctccatgaggtcttccaatttagttaggccagccaactgacatattgctcattaatcatacatattaactggagtagttaaacgtttgaaattcaacttctcactctgtccacaggaactagatcttgttttctcaatgtgatgacacatgcttcagaccctgctaattaggactttcccttggaaatttatcctgacatgtttcaagaacatccttccctctggagtgcaagttcattaaattattaatatccttgtataagtcttgtaaggttcactaacataataaaactttctctgttttaaaaaccacagctcattgtgaagggagaatttgatcgctcttcctcataccttttctgagtagcaaataatagagatcataattaataacatataatgccgaatgtaaggtaaaattgtcttactataattaagtcctaagcagttacacaaatataaggaggcatcattctaaacattctaatgcagataacctaaaatgagttcaacagaattcctctgttaagttgtgggagtgtagcacgtgtactatgtaagctatcctccacctacacaggcacctatatcttctttgcaatatggccctttaaaggcaaatctctctggctcccaatgacaatcagcaagtgtagctcagcagcctaactaggaacccttgatgtaatttgcaaagcccagcataatccggccactctgccactcactcttcaccagccagctgtttctcactaagcccccactctgcatctctcccctctgctgacggttcatcagaactttatggctcctagccctgctcctttcaaatctgttctgaagctttccagaatactcttaaacagttagccttcctatgtaaatgttgcttccctctcttggtgtattcttctataagttttgtccctatccaatatttctatattaacatttgtttattacatatgcaataaatactgcacatcagtaaatatcagtgatggtccacatgggtagcttggattcaagtcctaaatctgttgctcattagttaacctttaataaactgctctgtcatacactcatctcacttataaaatgggatcctattgaaggaaattattaaatgaatatgtataaattgcttttagtggtggattgcctgtggtaaggtcttgtgttatctcttacctccattgcccacagtggaatataagattcaggattcaaggtatttccaagcttatgtgtttcttggatggtaaataaatgaccagggatatatgagctcaagatgaaaaagatgtctacacaatagtgaaaaggtgacaggtaagcaagggagaggtttacgggacaggacggacattttatgtaactgaggcagtcatttttgttacatttgcttttaggatgtgtacgactacatgtagctttactagatgctaggaacagagacttccctagaggggaacagaacaaaagtcaaccgagaacacaagaggaaacacggaagtagtccaggggatttacagcagcacctgccttactcggaagcctcacttttattgtgcaaactagaactgataagagtgtggaagaggcagattgataaggacagagtctaaattacttttacccacttgcactctcaactgacactctatgttaagtttaagctgtttaagtgaaaaataacactcaaattaaaaaatacatcacagtgtctacacaatggcatgacccacatgtttgaggtttgaataccaccaatatattttccggatatttaatcaattgtgcaagaaaaaaagggggtgggactaagggatacctgcagaacacactagatgcagaacttcatggtaggggacagaaataagaactacaggtggcacgtacagccccggtgtgctggccaaagccactcctgtcccatcttgtcactaagggtatataatcagccatcttgtcactaatggcatataatcagcttaatgccaggcacctctaagctctttgctctttcatgggtcctaagattccaattcctaaggatatttcttctaaagtgtctaactccaaaactctaaaactgtgccctataagtaccctgatagaaatcacaacgtaagaattactagcagtttcttggtgctgatgctggccagtcttttttttttttttttttttttttctttagggctcattcttgttcctctgacttagactctggccttagactttgtgaactttgtgggtaaatgtcaccattttgttttaactttagcagtcttagcaagcaagacactatcagttgcctgtgtcatttatccttcttcctgcagatttaatctgctctaaacctgaagctagacacttaaccctgctaaagagtgaaacataaaaatgcacatcactgaggaattatgaaggggattggttctggagatgaggaaagctggtcatcaccgggaccaagacagaatctgaagagcagaatctcccttccccagtcgggggacattctaaacacgggggacagtcccattttcaccatgtcacacacttgcagtttcctctctcacccctgtgacacaaggatgtcaacagacatcacagcatattcaaaatcacctccagccaccctctactgctgctccccactagggacaaccaggaagatccaagtgctcagcaaagagccagaaagtgggggtgaaagagcagggctttgccaaggtagctggatgtcccaacaaaatggagtggaagtttgggttaacctgcatagtcagtggagggagtgaggtaaagggacaggaaagcaaggaaggaactatggggagagcaagtggtaagtcaatgtgcctggaagacaccacaaggctgcctgttctggaccatttcaggagctgtggtcactggaggactagaaaaggcaggaggagaaccagagaataaaatcaatagtacagcactagacaagagggattcattccaatattccatgctacagaagtagctacagtctacaagctatcttctatttctttcttttttttttaaacgtaaagagaaaaatccagaggttcccaacacatggaagtggcaggtgcttgagaaatagaaacactagtgatgctggttattataaattgtatatatgtatcaaactatcatactgcagcccaccaatatatacaaatattgtatgtcaaataaaaataagtaatgttaaaaaaagatttacagaagcagaatagctgaattgtgaatgattagaatttccccactgagggaacattaatcctattttaatgaagtattattatttattcagatcacagtaatatcctgaataacaggatatcccaggggtggagttaggcaataatgtcaggacaacttgtagtctgctttgaaaagctactattagtttctagtgaagtccatctaacgaaaagaaagggtagccaacaagttgatgcaacaggttaaaagcacttatcaccaggcctgaagatccaagttcaaagcctgggaccaacctaatgggaaaggagtgatgacttctctggaagttgtcctctgatttccatacacacggtccttggcttgtccacacagatatatgcacacacacgcatgcatgcatgtacttgtacacaaacacatacacaaaaggactggttaagagacagagagacagagagagaaggagtaatgtggaagatgtaagaccctgttgcagtgcaggagtatcaactcctcttgccaccattctaaacttaattcagatctcttattcatactaaattacatactctccccagtccttacaagagccacttgactgatccctgaagtaacaagacctctatgcctggtgtcgttgctgtcatagatgtatttttaaatatctcctaagatatgaaatgcacttgggattcttacacattccttacatgaaaattcattcatttctcattttttgcatatatcattgattttgaaacttggtaactctttataactttggtcgtaaatctgatttctgtccacaaaagtaaaaaagaaattcaaacaccccagatagacagtagtgttttcctgtgtaatgaacacctcattcacagttgtgtgtgccagtcaagaccaagactaatcttccttaacatttctctgatacctgctcaggctgagctggggccatggactttgtgaaagccagtcaaaagagcagggagccatcaaaaggagccaccttttcactcggcaatgctgaaacagacacagttggacacatatttcagcttgtgggtctggtgcctctttaccacccttgatttaaatctaattgctgctgtaactccttctttgtcctcataacgcttgccaacaaccaaaaccacctgtcatataaggaccagtagcccattatctgcattcttcccttcttaatgctcatgcagagtgaagtgtttataaagcaagtgtctaatttaagatgcacgtgcgctgttacttcaagtcatcctggaaggatccggttatgttttaccgttgcaagtttgcagacgccgttcatttaaatagccctgcctgcctgcctgcctgcctgcttgctgacagtaataaccctctgccagcctttttacttttatttttatctttttgcaaatactgatggattgacaatatatcctataaataagtttgttacattgtgagaatatcttggtctcatttttaaggtttattaaaatgtacattaagatatgtatcactagtgggtggctttgttaactttttttttcaccaaatgaacacattcacgtaagcagcaccctgttcaagaagtggagcataaggaaattgcctttgtggtttctcccataaatacccgccttcacattgggtcactcattgtaacctctaaccacacacactaagtctctcggcttggtcttccatataaactgatcaattttaagttttacaatttttacatttgttttactttttaactgtgggggcaggcaaggatgaccgacatgtgcacatgagttcaggtgcccatgctgacatgtagggccatcagattccctggtgttacagatggttgtactaaccaatagccatttctccagccccaacattatgcttctaaggaagatgtatattgttctatatagttcaagttcattcacttttaaatgttaaatactactccataacttattttgactcttatgatcatttgactgttaacattagtttttatcggtctatttgcatagctcagagtggcttgtacatttttaagaacatattacttattttttgttgtatgtatgtatgtatgtatgtatgtatgtatgatgcagtgggggttggtgttgctggcatgtacatgctatggcacacaggtgccgatcagaggacaactgtttgaagtccgttcttctcttccacctctctggggattgctatcatcaaactcatgtcgccaggcttgtacaagctccttactcaccaagctgtcctgccagctccgattgtacttttgtaaaggatttctcttgtattctttagaaactttctttgcaacattaccaatactttcatatgacaaactggatatttggatagagtagtagaaagatagaggatgaaaggaattagctttttgttgtcgttgctaccacattctgaagattatagcatatagcataaaatcaaccaccctttccatgtttaagtatatggtatattcacattgttgagaaacagaccaccacttattttcctcctcaaactgaagttcccctttaggaatcccctctcttcttgccctcccatctctgggaagcaccatctgctctctgagaatttgaatatttccttacccatagaaaagaagtcacaaagtttttgccatcattcgactagtttatttctctgagtcatatgatcaagttcctccctggcccatgttgtaccacatgacagtgcccttcctgctagaatgaggaccagcctaccatatgtgtgcatcacaccctgttcagtcatctcgccacagaaggacacctgcagcgcttacatctcatgttgttgagaatactatcccagtgaactttgtgttactagagtcctaggacagaggcctaattgtagggggcccaagagactaaagccagttacccagcaccctgaatttctaatcaaagaaataactggagggtagaaacaggaaaataagttttcattgtagtcacactaggaggatatcaggtgtggtgacttcctcacatcattcatgttactggcaatagaagcaacaaaagctggggaccaggaggcatgcacaattaagcacccttgcacagactgtggtttgactgattgtcatctcaactccggctctgatggatttcctggcacagggagatgactgcctgcctacaaagctcgctgtttatggaactcgagggtaagctggaaaggaggaatagctaaggaaaagtacatgctggagtgagggaagtctgtcgggaccatgactggagacttgggtgctgtctcagtggtctagagtagagttttgttaaatcaggcagtcacgtgccattagtgactgtgatgttcctctaagtcaagaaaatatctgactcttacctagtgtctttagcctcagaatgggagagaattaactagtttaatttggaagccttgtattatgagctgtagacagacctccttaaatgattagcatgttttcatgaatcattgaacaaaaagacaaagaaaggaaacaagagcaaaggagacaggccaagtaaagaggcagagatcccaagcttccccctgctaggagttacctgtgggctcaagtgcagggtcagcatagaagtatgtactggggtgtattcccagagatcccatgccagttctccttttactttactgaggagctccatttacgatggtggcactatttgatgatcctgcaagcagtctattaaggctccttttcccacatccttgtcaacagttgttatttcctgggtttttgtttttatttttattcttgataagtagcctttctactcattgtgcaagttgggaattttataagtaatcacttttgtaatcatcaacaaaccagtgacctttatagcaacaaaacttggatacagacacagacacacacacacacacagacacacatagacacacagacacacacacagacacacacacagacacacacagagacacagacacacacagacacacacacagacacacacacacagacacacacacatacacacacagacagacacacacagacacacacacacagacacacacacagacacacacacacagacacacacagagacacagacacacacacagacacacacacacagacacacacacagacacacacacaggcacacacacacagacacacacaccgtttttctataagaaaagagagagctagcccagcctgcctgcttctgaacttgacaatgattattttcagtttcaaaaaaaatcagtcaactaattgaacatttgggttacatttatgagacgtgtgggctctatagggctttttagggatgctgattcccagttctgagaaccccggctttggaaactctgctatggggcagagaccaggcatggtaactggctttctccgtttgagcatatactggtcttggatcatgaggcagacgtctaaattgtagttcaaaatctttttactgttgccaaacagaaaactctctcaggtttccagggaaaccatttagagtccatctatactattatgctttctaccttggttttcaggactgcattagattagcttgatcataataaggcaggaatggtagatctctctgtgctgggaactttgtgaaatgagatttatcaaagttgctactgaacaaatagccccctgagagcagccaccctacctctggcagccttccctagatggcagtcgtctgagagagctgcaggagatcccttatgaatatccaagctcctgctgtttgccttgctttacagtgggccttgggatgaacagacagaaacaggagttggacatggagggcagacaagtaagaagcattcctccaccaacatcacagccttctccccaacccgagcatctacgtccccacctccaagaccccgtgtccccagccagtgctgcagaacttgatgaacaaaagcacagtttagagatcacactgggctcttgatcatggttctcagccttcctaacgctgcactcctttaatttaatacggttccccttgttgtgctcacccccaagcacgttatttcccttgctactttctaactgcaattttgctactgttatgaattattacgtaaatatctgttttccaatggtcttaggcaacctctgtgacagggctgttctactcccaaaggggtcatgagtgacccacagattacaaacctctaccctagagaaaagagaggtatctgattttagtcttcatacaaaggagagaggcttgtgcccgttgtgttagcaaaattattagcaataaagtactccttgaattttccccccgaacaatataatttacagtacaaaaaacaaaacaaagcaaaaaccaaaaaccaccatttttttccttagctctgaggtagactctagctggtgtgagtgtagccatagccttacagggcagaaataagagagaactcctggggcttctaggaggaagaaagacaataaagacaatgtctagaagtaaatgggaactattaacatccatagaaattatggatccaatctctctctcataagctaaagcttccctcacgattctgtctgccttgtgccagagtgccctctgcaggtcactgtgacctgaaatcccaaggtcttgccagctccctatgctatgcgtactacagctaaagggggggttggggtggggggagtgtttctctgtaaagcacacacttaaaattgttcaaatatgcttctggaagttaccagacactcaggccttaagctgaaaatatgtgttggctgaagttaccctcacaaatatgttccttcacgtttataaccctcgcaaatatcttacttgcttgtccaggcttagaaaggatgtatgagcagttcagccctctctgactctaacggcatgcacagcggggctctgacaaggctaatgtaacagatcatgtaaatcggtggggaaagagggagtctggatgcttgccctccatacagagcatggatgctttttgctccctatcagtgttgttatgacatctgacacttgccttgtcttaacataaactctgtgataaaaattgatcaatagcctgactcccctacttccagcccaaacagatactcatttctcttttgaagaaaggagaatgcaaacaaacctgagcctgtagttttaactcgacctgatgcatgattacagaaggaatgggtcctctgcttaggtgacgcctttggttctatttctaggactcttgtgatttaagaaactacaatgcttctgtttctaagtaaactctttagtcttgcttagtcctcagaagcaacagacttgcatttagtaaaacttaaatatatagactttcagaaaatatatactgcaagactagatgtatgtacgtataatctatattaaatacacagacgataagattatatatatattccaatcttacagttccttaaagaaagctagagtttacagcatttaaataggcagcatatgaaaacatcactaattgtatgatttttgtaatttaatattttttggttgttgtcctgtgaatgtgaatttgggagtatttatgggaagggcaggttttatttattctttggcaatctcatacgtgtctgtaatgtatttttgatcatgtttgctatcattatgttttctccccatctccttcagaactaatctttcccaaccaactcttctcctgctttcatctccaagaaagaaaaagaaagaaagaaagaaagaaagaaagaaagaaagaaagaaagaaagaaagagagagaaagaggggggagagagggagagagaggaagaaagagagaaagagagaaagaaagagagggagagagaggggagggagggagggagggannnnnnnnnnnnnnnnnnnntactaaaagctttgaacttgccctccctggagtgaatgcagcggatggtggcaataatgaagatgtaggaagtgataatggtcagaactgtgacaaagacattcagtgtagcaaaaaatagaatcaatatttcattggtatacgtattagaggatgcaagtttcaagaggggaagatcacggaaggaaggaaggaaggaaggaaggaagaaatataggacctgctgggcttggtgagagttgtataggtatgaggcaagcatgggagtgggaatatggataacttaccaatgaccatatccctgagggaagctgactcgccgggcagccattaagcttctcctttagggctgacctcctgaggtcttcccctattcacaacagaatgttgacagctaaatcgtgtgcaggtctgcgcaaggattcgcagctgcctgagctcatgagtgaaacagctgcttgaaacagaagtccttaagagtttgagctttacttatctcccatagcaatgggcacattttatctcccgaatcacaatgtaatatttgtttgcttacctacagatccacctggcatttaaacttcctacccaatttcaagcctaaataaaattagtgaatgaaatgggtctgtctgtgggtcttagttagggttctattgctgtgaagagacaccgtgaccgaggtaaccattataaaagaaaacatgtatttttggctggctttcagtttcagaggttcagtccattatcagcatggtgggagcagggcagtgtccaggcagacatggtgcttgaagagctgagagttctacatcttctgaaggcaaacaggtgtctctctcctgtactgggtggagcttgagcacaggaggcctcaaagcccacctacctagtgatgcacttcctctgacaaggccacacctactccaacaaggccacacctcctaatagttagtgccacttcctgtaggccaaaccacagtaccctacttacgctcacaactctcacacaaaccaaaagcattgaaaaggaggagctaaagttgtgctgtttaggaaacaagttcagaaacgttcctcattcagagcatataaagcctaagaaaatgcttgcttatcaaataatttaactaggacagggcctggtagcacacatgctttcaatcccagcactggggaggcagaggcagaggcaggtggatctctgtgagtttgaggctagcctggtctacaaagcagagttctaggagagcaaggactgttacacagagaaaccctgtctggaaaaacaaacaaacaaacaaacaaaagaaaaacaaacacaagtaattaggaccagagcgaggacccagtgggtaccccaggaagccatatgttaagctgaaatggcagacctgaatccagaagttatattctgacctctactcagaccccatggcatgcacagatatacaataatagcaaataaaattaaaaataatagcaactaaattcttttatgtaatattagacatatttcttaagcatgtaatattagacatgtttcttagcacaagcctgcatttgtggccacctgtaatccaggtggttataaatttgggagtataaaaaatgagctacaataatgattaatatgtaagaattatacactaagctcacttatctagacagaagaaaagagctaggtcacattctgtaggtagaatatacaaatttgtcacattctgtaggtagaatatacaaatttgtcaatgcaacgcttttcaaattttagtaaatgtaagagatactggaagtaattctgacatacaaaatcatggctctgagcccctgggtttcttaaccagtttcttaactagtcaatccagtcttccagtccttgggtacctcctctaaaattagaattcagacccattttgaaatattttttccttttctatttcctttccttcccttcccttcccttcccttcccttcccttcccttcccttcccttcccttcccttcctttcctttcctttcctttcctttccctttcttcctcccttctttctcttctcttctcttcttttcttttcttttcttttcttttcttttcttttctataatgtatctgagttttgcttacactggtgcctatacaccacgtacctacaatgcccatggagaccagcagagggtgacagagctaccagttttgacagatcatgtgtgtgctggaaattggacgagttttctcaaagagtagccaggacttgtaaccactgagccatctctccaacccctgaaaagcatttattatttcacccaaattgcactttttatttgaacagaaactgcagagtcaccatacaaaatggtggttttaagtcatctttcacatactgtcctgatattgccagagtgtcaagaaagtctgcatggatcaagagcaattagaatctgttcatctcaagaagtgtatttcccaccatggtcgtgtaaaaccgccccacagcttcaggattcattgatgttcaagagtcacgtgcacttggaattgtttctttttatttttttaactgtcttccatattcctactaaatattgttgtgttaaaatgaaattaaatcacaatacttataatctatttttttttttttggtttcaagggaagacgagggaaaacaggacccccaggaaatccaggacctccaggaccacccgtgagtaaataggctgtgctcccgtggcaaaacagaacctgcttctatttccctttatccgtgcaagtgggttaggctgtcagcagtacgttggtgttgactaatatcaattacaaaactaaaacaaacaaacaaacaaacaaggcaagagggcctgaattgaattgggcaggtaccagctttgtagctttttttttccctaaacactttataaaattttcagtaatcattttgtgttttgaagaagaaaagtgagggcacactaacaagcgcactttctgtcatttctaaacacttgacatggcttcaagacaagtgtctctgggaaggaatttaaatggtgaaggcctgtatgtgaagttggccaaatgcctggaacaaatgtgctggactctggagtaattcccaactactgatagatgtcttttctgaagagccaggaagactaagaaataggtgaccacacaataggattcagagttctcagctcacaggtttcagtttgttgctaacctaacgtgtttgggggtggtatgggcataggtaaggattagcgtttacactcagccatggttctgattcagagcactcattaaatcttgtatagggaataaaggtggtttatgaactttttaatataataaaatagccaatttgttagactgagaaaaaaaagtcatgtagactataaaaaagggtttatgcttaggtcagcatttgcctgagaagacatcagggagctgagccactggttggtttctgcttggtaattgtgatttgtgggaactctgactcccctaaatgactaaaatctttcctttcgtataaacatcatccaaagttcccctggggtacagtcagttgtcaacagtttgagaggtttcccatcataggataaattgatggtctgtacctaactcactcactgtctggtcgagaacgacattggaaagaaaagtaagtcctgtaattggctctctgtgcttttccctcagcgaacgctttctttttctacaactcccgaaagagagctgctatttcccaaaggactagaaatgaagagagttattcacagcgaatcatttcaaggtcacaataactaacattttgaacaaatagctcatcaaaaaaaaaaaaaaaatctaattgcacccaattcacactgttcaagggtttcacaaacatctatttgggggtcctactaaatgcttaactgaaaccggacttgaaaaactgaataagaccctgcccttgctttgcttttaggagatttgagttcaggtcagaaaaatgtggggtgcagaagaacattcaatgaagataacacagtttgtttcctggaggaagtcacagagaagaataaaggttgaggctttaaagattgagaaataaaccaaagagagcgggggaaggagcaagctgggtacctcttccctgacaaacatacacctcccccaccccacccatacacacaccacgccacaccacacccctacatacacaccaccacacacacacaccacaccccatctccaccccaccctacaaccctatacccccacactgcccacctcacacacacccacaccctatccccacccctacctacatcacccacaccccacccccatcccacccatatactactccctgccaccacccccccacacacagcatactaccccacaaaccctatatgtcccccacaccacccctccataccacatctccaccccaccccatgccaccccacatgtacacccaccccacccctgtcccccaggaaagaagacagtgtgaacaaacacccggaatgtaaaacctctgatgggtagaggtgggcaccctgccacagacagcccaggcacagccagaggccaaaaggggatgcagtcaaacctttccagggtcctggcaaaccccgtggaaagctatgagagtaaacagagggcctaaaccagagagggcctgggccagatttcactgatggtcactctagcaacatagtggaagcagatggctgacagcaagcaagaccaactctagctatttattgcttctgaagtctctgcagggcatttgtgatagatagctgcttggctgtcctgcagagctatttgtatttgatttccatatagagtgcaaggtagagaggagcagtctagtctatttttaaatttttttttctgtcttttctagcatgaaactgggcttcacatgagccgtactccatgacagggaataaggcggctaagagaacgggtggtcgggcactaaaatcttctggttgaggtttgagatggtgacggtacgcgcatcttcccagtggcttagcttgcgccattcccaaagcaagcatgtgaagggcttatgacaacttcaaaggtagaaaaataaaaataaaaacaaagaagaaataactttacctcttatgaggcagtgactgaacaatatagccctcaagtgaatgaatagctgagacatttgtaacattatatttgtgcagttttgttttttaaatacattagtcaatttgattctcagaaagaacctaggaatggtagtcgtcaggagcgctgggcaagcctttgatggcagagtacttgattcagtgtcctcctgagaccattcttccccttggggatttaggtgctctctcagtcaaaggcagtgtttctctggtggaatgtcaatgcagacaaaaggagtagagactggggtaatgtctttgaggacccaaggcaactcaaaactcaaagtaactgaactgccttagtccgtccttgacctgaggttctttgttccgggaacaaacttattttctcacttccttaagaaatttttatacccaaagacaagtcatttcaaatgaataattttctataactttagagtcagctagtgagatatgtgtttatgtttgtgtgtaggtgggtgtctgcatgtgtacatgcaagagactatctatgtacctggaaaggactatatccaaaaatcataataactaacattttaagaaaattaaatatcctggggcggagaacaaaatcctaggagatattgactacccatatttgcttttctgttactgagataagtcactctgactaaaggcatcttggggagaaaagagtttatttggcttatacatccaggtcacaatcaaagaaaagtcagggtaaaaactcaaacagaaacaatagaggcatgctactcactgactcgagcactggcttgctcagctagctttcttatacagtcaagactcacctgcctagggatggtgccacccacagtgggcttggaccctctcatgtcaatcaccaaccaaaacaatccatcataggcatgagcatggccaatagaagcgaagccattcttcatttaaggttccccattgcctggtgattctaggttgtgtctagttgacaataataactaaccagggtatttactcagtctgttgaagtaatgttactaagttatgagacactgtatcttgaatgtcgtatccattagtacagatcagttcaccacatttcaatttcatcatcagggaaattttatcttttcagggaagacttacttgccgttcatacatgtaatttacagttggttgccttctgttgaacatatattttaaaatgattttgtacactttcctgtcaaacagcagacctatcaatacagaggtaaatacttccaaatttcctaaatgactttgccaacttgtcattttcttttttagattaatatatcattttccctctccttccttcaaacccgcccataggcccctccctgctctctttcaaattccgggcttttctttgttgtggtaattattatttggggggaggggagggaagggaggttgctacacccctttgttgtctctaaatgtctgtagggctgctacccctcttagactgtagagtttgcaaataaaagacacaaaaacctttagataataagccttaaagtgtcagagctgggcagatatcaaccttctatgctattttatctactttcctgtggtgatatcacctgagatatcacttgccatgttctgcctgggccactcccactcccacaggaaagctctcatggccatgagctccaatccacccacctgtcgtcctcctctctccctcatcatggtccctgcctgagaccccaagcctggaaaccttccctctgcccctctcctctgcccagcccaggctgtagacatattttttaaccaatcaggaataacttggggaacaaagtttacacagcacaagctgatatccataagaatctgctcactttggatcaaccaggatcttgaggtatacaatttagcatttgaatacaagtagcaccagaccaatgccctacatttctttccattaatttattgttatatacatatatgcatatgtacatatatatgatatatatgcatatgagtatacatatatagtcctaaatataatctgcttggtctctataatgatacttcctttggtattagatagccaattggtgtgctcttcaccaaagaaggctttttttttttttttttttttggtcggcccttaataatgttctatgatgaggcctacaatctttccctatccaagttgatgtctattgttgctgtttattctagtttacctcgtgcttcagccgttgtgtggtgagactttatgggtgtagcttctgatatttctcaaagaaacagcctaccgacagactgtgttcctctggctcgtgcagtcttgccaacctctttcagccatgatccctgagacttagttatgggagtaacctgtagagtatcaatgggactgggcttcacagctctacgctttgatcagtggtggttttctgtaatggtccccctctgttgcaaagaaaatctccatgctgaggcatatgggctacacttatcagccgagatactggaaaatgatgtgcggcacctagctgggtggagaggatgtaggtaagggtttgggtttttaccatgtcgtggacctagagcctgcaaaatccgagagcacagtccagcactctggcaagagtgttcttgaactgtagcatagtggaggcttctggagtccctcctgcctcttacaacagccactgatcgtctcatgagaacctcacactcatggtcccatctgatagtaattacatcctcaaagtgccacccccatccaaacactgttaaccgtgaatttagcgattacatttccagtgcataaaatttgaagggctcattaaacaatagcagaaggaggccgtaagcagagagatctgaaatgagtaataccttgagatgtgctaagattataatcaagaacagtttctcagagagacaaaataaaagaactctaaactctctcgtcaaagaaataagtccaacagaaaaagtaagaaatgcagtaaaaccagaaagctttattacagcacgagctcggtattagaagccatttccagggtgttatggaatcccagaactacctcaagaagctgaaattaccctccttttgccacggggtaagtggtccttacaaacaccccgcaactttcccggaagaatggaagtatatgatgggaagcccaaattcagactccggatctgagtcccaaactcattgtgcttgaggacttccaggctgtgatctgatacgaaacggccttactttaaagaccacatacaagcatagtttgacttttctatggggatccatggcacccatctcataggaaagcaaagtagcatagggtatgtgggatgccatcttcctgggcagcccttcctggaccgtgcacgtgactctactctctctgtgaatatgaaatcatagcgcttgccccacccacttcccacagtggctaggaggaccagctgccatgtatgtatatacaggaactttctgttgtatttacataactctgttagtattgttgtaaacatccatttgcaatgtaggtagaagagatggccctatactacaatagaatccacgtggtctttctcttctcgagtttcccatttttgtgcagtcaacaaaaatgcaatatctacccttgacttgcttaaatgatcactctgcgtcttgagtacttattctctgtacgtaaattcactcttgaaaagacagaaattatttccaagtcactgctacagccgaaacgagggactcgagggtattttttttctcccctagctttacagtcgcgttctggcttacggagctggtttgcctatgactgagacactgtattttattacttgtgatctcttctgagtctcacccactgctctttagactccaacaaaaacatctttccaaaacagttttctggtgatcttatctgcgtatgcaatggaaaatattgaccttatgttactataatgaaacttgggaagccagaccgctcggaaagccttagtttgtaagaatttgagttcttagtttccttcaaagagattggaaagctgtgaaaataagctggagtaggagggaaagccagagaagttaatgagccattaagggaagcatgtaacagcccacccctgtgacgttagctctgcttctcatttatcatttctgtaaggagcattgattaaaagccgtgttaactctaaaatgtgttatcattctttctattgcaggaatgggtttgagctatctttattttctttctggcattgtttctgtgtaccgtttcattattgtggtgtgagaattcatcagtggcctcaaatatgtcacatttgagtgcagagcaattgagtttgaaaaaaattttttttcttttcgagaaatatgtaacgtgggccagcagcgccctctactgtttccactggaaattttctaggcaaagatgcttctcagagtgcagatatggacattgtttttacacgtttgggttttaattatcagtgaatacagttttcgaatcttattttcatgatttgtggcactctatgcttttcttttactttaaacataagcgccatcctatccacaatagcttttaacatcagcctcttatgttcttaagttgaaaactcagccctagccctggcttctctagatgcccatgtatggtaaaacgatgatgttagctattaacattgtggagctcattacaaaaaaagcctattttccaggtcaataatctgatcttaaatatgtaagtccattttatttatgctttaatttaacatcactgtaagataatttctttcacccttaaagaaagaatcatcctatagtgataaagtctgtgagtgatttaacatcaggtgatgcaattacatgagaaaatttagggtgcaatttttaactcattttcaactgtagtctcttagctgtgacttcattctccgtggtttcggtaaccttccttcaaccatcgcccagaaatgtgaagcaaattccagaaataaaatatttacaagttttcagctatacctccatgtttagtgaaatctcacactgtctcattctgccttcctgggggctgaaaaatcacctccttaccccctggatccagtttccatatagcacctacccaggagtcattgcgttatcagattgaccaccatagtatcacaaagtggtattacaacaacactctctttacttaactacggcctcaatttcaatggtagtgaggctgctgctaaaatgacaaagagaagtggtaaagtgtttcctttaaatgagaaaggtgaaagttgtcaacttaagggaaaattgtatgctgagatttctaggatttacagtaaaaacaaatcttctatttgtgagatcataaaaagaaacaaatactgcttgttccactttgtagttcaaacttccaaaacatgtatacaaggtgaacacttagcttaataggggacatttagttaaacatttagtttaaatggaacaaatgttaaattataatttccctgaccttaatggttgcttagcatgggctacgtttctcgggtttattctctgcaggtaaagagggattagtgctattatcttctaaccactaccttaaacaatgtatatacaatgattcaagaaacaaagtagcaaactgcagaagtctctgtctcagtctttacactctattgtagggaaggaagcatatagcacgagttaataaacattagagacaaaacaatttcagtgtaatgtgaagatctctatgggaatggagtgattaatggaataagaaatctcagaggtgttcttctggtcaaggtagcctgaggaagtatctccctggtcaataacatgatttaagaaggaattagccataggatgtcaatagacaagaacttcccaaccagaaagctggatatgttcaataaatataacagaactgaaaatgtggttttcgaaaaggcttggggtgggagcctttatcacgtaaggccttgtaagagtgagagtcggcaggtgaaaatgagagaacttgggacttgagtggtcactgtttccttctgttaaatctcatgtgtgcgtgtgcgtgtgcgtgtgcatgtgtgtgtgtgtgtgtgtgtgtgtgcgtgtgtgcgtgtgtgtgtctgcagtaattagctttctggttgattttgttggtgctggtgattggttgttttaatgtgatgaaatgattcaaataattattatgaagatgatttctttttagtctatcatttttagtctttaattaggcaagactgtagacttgtttgccaagagggaggggaaaaaaagctttgattgattgttgactgctcaatttcaaccatgctgtgaacacaaagtacatttttttcattgaagatggaaatcctctcacatataattcagtctttttcccctacctccaaccctgatgttttcctgctaataggctacaggttaagtcagatggcagtcataacaggcaaatgaccaccctcaaagcatcacagaaactcagaactactgcatttgacccccctagtctattccagtccttctcttgtatgtctccatctctcgctctgttacaaagagcaaaagtaagatgccactgtatgcaatacaaagcctgactacctctcaaagcaacctgacaccctaaaatacacttgggctgctgaatgaggtaggtgacaagacatttcactgcaacatcattccctattaaaatatcatatgtataactgtgtgcattttgaggctcatgatgtttcaataagaacctgattcacttgcaagccttgaactcatcaatgcccttccaaatgttcatttcatcagtgaccctctgcctctgtaccaactgactagaggccacacactctaatgacaatatcaaaaagaaaataaacctaaccatctatttgagccaatgggatagcagtttcatctctgattgaaaaatatgatgacatccatgaatttaaaaacacattcacatagtatgcaaggggagagagggaggaggagagggaggggggagagagagagagatgatccatgaattatttttactgccacttgtgcattattggggtcatggttccagacaaaacagctgttgtcaacattgctaaaattccagtgtcaccttgaggccacggagtaagcaggcacgcgtgtgaaacagctgggatcagactgagaattcaaacacccacactcggatccgagttcttgcttcctttcctccatatgagcagcagtagtagtgggacgttactaacacttttctcactgctaaaccttttctggttatagccaaataatggtggaaaaggtctcgtcttcatctgctaccgactgcatctccatctcatatcatagtagctctttggactggcctatgttctttctaataacagtgaggcagctttttgaaatccttggttcatttgggactaaacataattagttgggccagtgtgtgaatttatcatgattccatgatgttgggtaaatgttacagtctgaggaagcaaaatccaatcagatttatttgaaccttttatgttcgaaaacgaaactagtttctgaaataattttaaagttcacatttggctcaatagctccaaaagggatgccaaatcaaatggctatttagttttacaggtgtgtgtgtgtacaaatatatatatcagcaagaaaatatgatctcgattttagcaagactctaggaaagactccagcaatcagattcagctctaccctatgacatcagtttttgtctgcatgacaactatggtttcgtttagcagaaagaaagaccaagaggcattttgtgagtgaagatagtagtgtcttgggggcgttgaaattgaagaaaatctatagaaaataagatatgaagcaatttctgatgtgtctactaattttgttaaatgagacaaatatctagcgaatatggtggatggttaatatttgattacaatattatgttgtcgcttcctgagacattttaatatgatgttttattacttcttccagaactcatgcattttgatcatattcaactctgactcctgctcctcactccttcctatccccagccacctcccaaataagtgtttcctgttttaaattatccaagtatactttgtactatccatatgctcaagggtgttggaccatccactggcatatgaacctacaaaaggctacacccctaatttcttcatatccatcaactaagtcagggatgggagcccataaccctccacctccaaattcataaggctttatcattttattttatgtaccatttagaatccttaaagaattttgcaaacaggaaacccactctacagacttgctaaaggtcactgtcactaatcgcgtctttaatcccaaggtcaccagtgttctctcttccagaacccctttgtgcgttggagctaagtaaataagcaaccatcctccggtactgtcccacagaactaccccgagtacacttttatgtcacatcgaggttcagttgtgtcacagttgtcatttgcagactaatcattagaacaatatggaaatgagagaaaacggtatcactcttgagggggaactagagactcgatctccctacatataaaacctgcaggttcccattgtctacagcagtccacaatgtccccagcgattcaaatttagcacatgctggtcgcctctgtattccttggctgtgtaagaactgccagcatcaggccggttatcttgagcctcagtagtgtaccttagaattgcatttctctgcgcaggaagccttgttattttcccaatgttttcaaagggagtgaatgttatcacttaattacagtaaatggtagcacagagggctgataggtagacgctgcctctgagacctctgggagccgactttattccttctttggtggtatatggagaggttttgggggccagacaagatggaggtacagatgttcccacggtgaggcttctgttggtgatcttttgaagacgtcactggacacagatggttatcttcacacacccggaggcttgctggctttcatgtcccctggtttttatcgtcttgcactggatcattgatgttgcttccaggggtggcaaagacttgaaagattcctgctgttccttctatctcagggatctgacaaataatggtttgggtgtttgtttgtttatttgtttgttccctttttttcgggacctactgcagatagatgaggagggaacactttgtggatgggtaagcagaatggcggtattagccgaaggactcattcatccttcctaacgtccatgccgtgggtgtcagtcaacaagtactgctgtatcgataatacaactaggcttagaggaatcagattgatctctggggggaaacgtgcaccttccaaaatgctgctttcttgccttgggctgtaaagggttaaaaatgtttgcaagtcatagcataatttagaaaatctgttttcacgaaatggattaattacacccattgaacgcgttcactgtcacagccccatcctcccactgccgctccaaaacgacaagtgaaaccagggactgggtaattttggaaaacaatcaggtcacatagcgagtagtttgcttattcacacaaccatgaactgcctatgcttgagttccctcaattacacagctcagtattcaggccagaagcagacaagcccagcgcaagcgagcactttcctagaatacacagaggaatgagtttgaaaaatctccaaagtggcagatggggaaaaaattctcattcaagttctagaagctgcttatccagcaatccctcacctgttaaccacacagctttggaatctcagaaccaggggcactggcaatatcccagaccaagacccccaagagctatagacctttacagatatggtgcgggtatatgccaccagcagagacgagagaacatgaggggccacagtactgaacattgttggtcacattgtggacatcatgggtcacagaactgaagatggtgggtcacaatactgaatatcgtgggtcatagtgaagattgtgagttacagtgctgaagatggtgtgtggttccgaattcggcttcttccttcttccgcgtgtgaagaggtaaattctgcgagcttaaacctgtaatttggtgaaaaggctgcatgacattctcaaggaggtcatgcaggccgagagtaggaaaggagcgatccttatttctgccggtctcaagatgagatttttcagggtttggattcttctctacctcactcttcttttaggcccattcccaggtcgcacttgcccttcaatggtgggtcgcagaactgaacatcatgggtcacagtagtgagcacaatgaataacactactagagattgtgagcatcatcgagaacaggactgaaaatggtggctcacagtactgagcatcatgaataacagtactgaatatcatgtgtcacggtacttatcacgaactccagagactgcccctcgaatgagcaccaggatgcgcaaacttcattgaatgttgaaaccagcgttctctggtaacatctctcaaagccttcagtttccctcggtgccgatgcgtaccaatctctcttctaggacagaccataacggctctgctgtggccttattagaaagatatttctttctctctgtgtgacagcttcacaactaatcttctgtgtcttcgtgctcaacggagtttgcgatcatcaaaattctccccaggtgatactgctcatttggttagagtgtctcttctacctcctttgcaaactgttatttctcctcttctctgaccatagcataagcactgggagtttctacccctcactggtattatttagcctcacgaagcctgttagctattgactgaggtcatagtctacatttcctttgcagctgccttttcttagtccccgtgtcttgtctttctattctaagtcctgggtgctctcattgcttctctgctctttctttttcctcacttagtctctgaatctattctgcgattttccctcagtatcttccccatgacatcttttgaaatgctacagcagatttcggagttgcccctatagccaaatagggtcagctcattgatcctataccccaatgagagattctgtcatcttttacaacagaatgaccccacctggatatttttaactggctttaaaagacggttgggttttgggtttttttttttttttctcctctcagtttaagggaaaaagttaaaaaaaaaataaggctgcaggctcaggcagggtctggattgaaacccaagtcttctccctggctacatgtgagtaagttatttaatcctatgctacatataaagaagagtaccattcattgggttattgaaacagttcgtgctatagtaaatacacttatgttgtggttttaatgtagctttttgacagcctacatttccagtgttgaaagtttgtagcttggagagatggttaaaccatagctttgctttcaaattctttgtttaatcaaaatctgttggcctttgaccttattaacagaataaaggcaatttataaatgaagctttcccggcatgtggctagctcgctgtcttggccttctgccgtctcccaggtaaggatacaacaagaagggcctcatcagccagaggaccaaaccttagtgttcagctccccagactcaagaattatggaaaaataaatctactatgtatagattacctggagtgtattagaatggaatgccttttgtactggattctgtcattgtctaattgtgcagtttggaggaaaaaacatacagttgatttttccatctaccaaatggggaacataaaaataccccttcagttcactgagatgtcaatcaggagctcagattaggttactgcctttgcaatcacactaccctgcaaacctaaaacaaaacagaaggtccagagacttgtagaattaccataagttaagaaatatgaatctttagagttgcacaatcataggctagtgaaatggctaagcagtttaggatactagctgctcttctagatgtcctgagttcaattcccagcaaccacatggtagtttatggatataaagggatttaatgccctcttcaggcaaacagagttctcgtacagaagaagaagaagaagaagaagaagaagaagaagaagaagaagaagaagaagaagaagaagaagaagaagaagaagaagaagaaggaggaggaggaggaggaggaggaggaggaggaggaggaaagaaggaagaaggaggaagaaggaaagaaggaggagggggaagagaaggagaagaaggaggaggaggaggagaaggaaggaaggaaggaaggaaggaaggaaggaaggaagaaaggaaagaaagaaagaaagaaagaaagaaagaaagaaagaaagaaagaaagaaagaaagaaagaaagaaagaaagaaagaaagaaagaaagaaaattcatttgaggagatagtaaagcctagtaccaacaaaatagggattctctgtggagctgcagatataatccagagagtaggtacaccatgactacaaaggcactcctctgagcagcctggcttactatgaagtaactggccacattcctagggtgtcacattagaatcccaaacatgaacactcagtgagtggttcctgaaatcctgtcttcatatttgagcttctgggatttatttcttggtgctgttttgctttgtcttgtcacgtaagtatgtgtgcatacacacgagggtgtgtgttgtatgtacatacttgcttgcactcacatgtacacacatgcttgagtgtgggaaagaaagtcattgtcagcatctcctccctcagtataatctgcagcagacatgggctcaataaaaaatgtaacattataagtttacaaccatttaatttacagaattagatctcaggcgctactggaaaatttcattgagagcaaatattaaacaaatgaaaggattggtgtttcattttatattcatttaatgttgtgtatatttgagtgccaacatgtatgtatatgcagcatgtgtatacttggtgcctgcagagggattaccctggaactggagggttgtaaaatccaccatgtcggtgctaagagtcaagcctgggtcctctggaggagcagcaaagactcttaaccactgagccatctctttacccctgaaggatccatgtttcctaaaaatgaaaaataacaaaataacaaaataaaaaaataccaattctttctcaaatcatttctgtccaaagagccttattgatttttcccctcagagttatagtatgatttcatatgttggagttctagtcaactcccacccatgaaatcgttcctacttaaccagggatccctacatcctttcttctaattgacttgccaagttctcggattaatctatatctgcagaacctgtcttctgtaaatccagaagaagtaaactctttgctctttttgtgaccatatataagtgaagccaacatgagcaagcaagataaatatttataaatatccataaatattttctcataatagcagtggtttattaaattcagacagtatctggtattgggggtgagggcatgcacggggaaccttctctataccaaaactggtgttatgatgttgtaaagattgaaattctgtcctcaaagagatttcatcctatccaactcaagatcaatacatgagccactttatttgatgtataaatgtgctgtatgaaatcctgcacgatgcatcctaagtgaacacatatatgagagaaaaaaatccatttaacattagcttttctgatccctgctgtaacacctatgtctgaggtcttagacttcctaatgaaaattttaaatatcatgagaaaaaaaatttctactttacctttcttactagccatgcagatggtggaaaggatcagtggaatatgaacccaaataactgaccaataaaaagcttcctatttgttctcaaagcaaagctaattttactatacttcaaagattagtgcaaaattcttcacagaagttttgatataccaaaggccattactgtagatacctggaaatccccaaggccagagatagccatgtgctactcaaaatgtatatttgtgagtcctaggagaacctccttatactatcagggcattgaagggctatgcttcattgagacaagtggcactgagataggttatagatgctcactcagcgaacttatgagacaggaaagagtgtttttaacataaacaggaatgcttcagaaatgaagaagagtgaatgtgcagaagttgtggaactgctgagatcttgattcagtgtttagaataggctaaatctaaaccaaacactaggacacatgcaaacaaagttcacgacaaaagttttgggtgtggggtgagacacaaaaatatagtcctttgtgctttgcatactaggtgagctggctgaaaagtgagactatagccaagcaactaaaaagtttaaatttaaaagtagattcaccatacctttcaaacaccaagaatgcatagcccagactgaaatctatcaagaggatattaataggcttttttctacttaagtatttaactactaacacagtccttaacttcacactatgcatctgacatgactggtaatatgcattgtgatctttctgcttttcatctccagcaagaatttagccaaagactccttaaaggctactaaaactattgctgagggtttgaagttcccgaattgaagatagcgttaattctcttttatcaagcaggcacggctttgcaacttcagcacctctaagtttatagaccgatcaaatcagtacacatcatttaatcaaaacagttgagttccaagcaggtgtagctccctggagtttattagcagttaaaagctgccatataatcgtgtactactcacattaactctaatgtcttatatcttcaggtgtgatccagtccaacagtctgagtaaagaatcagagctacacacacacacacacacacacacacacacacacacaaagtcatttagagccatgattcaactggagtcatgttgttggtcactgttgtaggcaagatactctaatattctttatatagtagactctattcagtttatctagaactcttacgtagattaaccaatggagacatgctctctctgattattcccccctcatcagagagtgtggcttatctcattgtcttctcagttggttcttaagcacaggtctttaagagaaaaaatgccgtggggctcctgtgctggggagagttgtcttcatatgtttttaacttctccttttttagaatttgcttatgctctttaggacttgggcacttgtgaaacttgaaacaaatgattccttgagtcttctccagctatgtttcaaggcagaaaagaagacagacagagagcacagtccttggtaatgcggctacaggaatgccttccaattctaagacctcagggtcagcattgttttcttaaccatacattgagatgctcttggtacatacatacatggagctcatccattgttagcatcctctgcttcattggaagttggttctttttcatctttgctatttctttttattgtattgtatttatttacatttcaaattttatcccccttcccaatgaaccccctatccccttccccttccttcctgcttctatgagggagttctcccactcaacccccacccccactcccacctcaccaccctagcactcccctatgctgaggcatcatcgagcctccacagaaccaagggccttccctcccattgatgccagataaggtcatcttctgctacatatgcagctggagccatgggtcccaccatatgtactatttgattggtggtttagtctctgggaggttgggggtgtctgattggttgatattgttgttcttaatgtttcaaaataaccaggcaggtcatttctataccaggtgaagtcagcgtccatgtgttcttcccagtctgtgccagtgtttgctttcagacatgggttcttcagctgtctgagagagcttgtgtaaagtattgctgcaccagtagtctgccagctataaatctctattacatcaatccttgaatttatggtacccaaagtactccactgactaagaagttagaaggaaaatgtcaccataaatgcctatcacctgattaaatggtagagcttaacatttcagatcaaacccacttggagcactattttgtagacttgacattttatgacaagaatatgtgaaaatatggaagtcgcttttgtagatgtgttgatctttgggggtagctgaataattgttcgcacttttctatcggcttgtggctcccgacagtgggctgagtactcgctacacttttacagggagcagacacattgagccacctatactttaccactctgcttccaagagtaagttcaatgatctcaggattctggatccagaatgtattctgtgtcttcgaggcctagctgtattgggtgggcagataaccatctacaaagaagcatacccaattctctcctaaactttcatataggcatcctacaacttctgctattcttttggcacaacccagtttcttttaatgtttgtttttcttttccttgccttccagagttgctttaaagaccatcccctcacacatgtacataacttgtattgatcaaccactttttctcccaacatgcattagggtgcatttgcaatacaattgtgttctgtaatgttcatgtgtactctttcataaatgcatgaagacagatgtgagatgcaaaaaaacccagctaattcttaaagatataataataataattactattactattactattattattataaaatgcatattcccctaagtaagcaatagggttatatttaaaagaaaaatacttatgtccctccatcctgccaacacagtactggtttgtgaaaagtgctaactacaagttttgttgtatgtatgtatgttgtatgtatgtaggtatgttgtatgtatgtaggttgtatgtatgtatgttgtatgtatgttgttgtatgtatgtatgttgtatgtatggccatggagattcattatcatcttgtgttctctagggcaacacttaataaaaagttgatgtcagttaatacaagcatgattttaggtagagagctgatctctgtattcgcaaaagatattgacgttttagggcaatgagactagagaaataaaggatatgattaataaaggaagcggtcataaaatcatgtttgcatgtgatgtgatctatgtagcaaaaggcattaaagattttgaaaatctcttggaactgataatcacatttcatcaaagtagcaggatacaaagccaatatacaaaaccagtcacttgtggatattccaagagcaagcatgttgagaaagaaatatcacaatagcatcaaggaaagtaaaatacctaggaataaatttaatcaaggaagtaaatatggctaggcctatcacaccaatatctcagattcctggtagaaatttctgtcctagtttgctttcttcagtccttcccacaactcttccattgggtctctggactcagtctgatggttgtctgtgaatatctgcatctgtattggtcaggtgctagcagagcctctcaaaggatagccataccaggtgcctatctgcaagcaaatcttgccaccaacaatagtgtctaattgctctggctagaactttgagtactatattgaataaatagggagagacgaagcagccttgtcttgtctctgattttcgtgggattgctttaagtttctctccatttaatttgatgttggctgttggtttgttgtatattgattttattatgtttaggtatgtgtcttaaattccttatctttccaagactttcaacatgaaggggtgttgtattttgtcaaaggcttttccaacatctaatgaggtgatcatgtgatttttttttctttgagtttgtttatatagtgaattacattgatagatttccacatattgagccatccctgcatctctgggataaagcctacttgatcatggtgaatgatgattttatgtgttcttggattcagttttcgagaattttattaagtatttttgcatcagtattcataaatgagattagtctgaagtcccttattttatagggtgtttgtgttttaagtatcagtgtaactgtggcttcatggatcaaatacttgacacctagacccatagtgcctcacctgactgttaatgctgctacccatagtgtcaaattcctcctttatttatatatatttccagaaagagcaatgtgtatgggataacttgtctcccaggcttcaagaataagatattaacttacatgtattgactcgaaaatctacggcctccctcatttcaatggctgctttcctcattatttcatctaacagacctagaatattttactcaagactggatgatggaaaaatacataatgtcctgagaattcacttctggcattagttcctttttaaattatttatttcagcaaggtaatagcaccatttgtcagcctgctccattacctgcaggtcccatcattgtctcagaaagcacaccaactttctcccaggcatttgtcaccccatcctcaagtcctttttgtttcttggcgcagtgctaatatgtcatattaaaatcaactccaatcacaagtcatgcctaggaaacacctggtataaatgttaagtatgtcacactcttaagatgttacctgcttcggaatgtagctagaaactgtaccttaaggttttttcttcacttttcaatatttacgttctctctttaaagataatctttgttcaatgaagctctttaatgtgtccagccatatatatatatacatatatattgagagagagaaaggagagaggagagagagagaggagagagagagagaggagagagagaaaggagagagagaggagagagagagagagagagagagagagagagagagagagactgttctcccccccccccagatctcaaggtctagatgatctatatacaatatgtctgggatagatgactctacctcggcttaagctccctcataaaataatgctaaacttggtgtttattatggttttatcccaaaaatgtaacctttgaaaatcccagagaactcttgtcaccatcccctcctggaagatctagagatggacagctacattaattcttatttactacccagaccaagctggacaataaaaacggccagtgttaaaatgttttaacatttggtctgaaaatccacgtgtatgcccattttaaacaacagtcatcagaaaaattatacatctccatattttatgttaacaatgtgtgtggtagcttacatttctacgatacattcattatgatccattctacaaaaaagcacagaaaataaactgaagttacaaagtcctccctggaattgtctcatgggtggaatggaatcccttttcataaagggcttgatgatggctgagcttgcgaatgtttcctgttgccatttgggactgtactttggcttcatgtaaaacataaccagaacaacaaaagctttagggctctgattatatgttgatatccatgaagttatttattcagcagaatatttgacaaaatatactgagtatattatttgtagcacacattgttttgaaaactgtatttggttttgttttctcattcagggacctcctgggttacaaggactacagcagccttttggtggatatttcaataaggtatggctactttatttccacaacttgtgtgcatagagattttatgtcattacagttttaggaagaaagcattattaggtccttacatctcagtccttgagacaggatcacatatgctcaaagcatctttccatactgtacaccatgttttcaaacttacattttaaaagaatcctagacatattataaaataaatgcttatgctatagttttttgtaagtgatagttcaaagtttgatgataaagaagcaaaagaaataatttagtttggcttggtttggtttggttttttgatttgtttgtttggttggttggttggttggttggttggttggttggttggtttttttgagacagggtttactactgtgtggccctggctgtcctggaactcactctgtagaccaggctggtctcaaactcagaaatctcccttcctctgcctcccaagtgctaagattaaaggcatgcaccaccactgcctggcaagaaataatttgttatctgaagctctgagcagcaccccacctgatagattcctgaaaaccagtaaatgttgcagcaaggattcaagcacatgttcatataacacaaatcaagagcaagagtctccccagggacggagaggaggagcttgtaattaccttgttatcttctccatcatagcttgaataaaataataatagtactgccatggaactatcttagcagcaagagtagccttgattatacctacgaatggtgctggtaacgaatggtgctgcacaggactaggatataggggtgaactcattgggggttcattgttcaaaaacaacatgtggggtctgatcacaaagcaaaagccagtaccattttgtccttcattgcccaaaacaacagtaactggagttcttccaataccagccagtttatcattgataacttgtgccaaagaaaaagttagacactgaaggacactgaaaccctataggtggaacaacaatatgaactaaccagcccgcactgtagtacatctgcatacttcattgcccttgacaagtttaaggttatgaccttgttttgaaccttttcatttgtttagatttttaggggagtgctgttagcatggttacaatatgtttgtttcccgattccttatcaaataaatcaattgctactagcttttttaaaaacattataagctggcaagtttttaaaaggtaagtttgaagtgtatgtaaattgaatcagtgtaaggacatttgtaatgacatatactgttataaaataggacttataataaaagcctcaaaataatgagaataacttgaatctgatgtcacaagtcagctagaaatgtttaagtactatactatattactctgaccatcagtccaaaatggaccaagctggtacccagctacttaaatatctgctagcccttgcaaagctcgtaaggcttgtatttttacaggtctcccaacgctacttctagatacactttttcttaccaatgagtcagtttttccttaaatgaaaatatatggaacctttgtattttagactctgaagctgaaagcgttttagactttaaggttatacttgctgtaatgggaactgagctcagtagctgagtagggacttttgtgagttgcatcccagtacctttgacttatctattttttctcctgagaaaaatgccagttactgtcagcgctaccacagagccaagcttcacattcggtcacatgtgctctgaatgtggctttgtagccagaaggtaatagggtaaatggggggggggggggtctacagcttatttctcccctcaataatacaataggaccactttgactcagaagtgtttacctctacagtgactaatggaaggtagtgtacggaatagtttattctgtttcctcacgagactgggcaagcctcctacactgaagtcccatgatctataagaaaacccacaggcaggacccacactgaatgatatttttgcattgtggccctcccttcttcacaaatcaatgggctgaatgtgccctgataagcaagatgcagttttcacttggcgttctccctgccaacctcatctagttttgtatagtaaggttgttgcattttgcagtttgttgcatgcctgatggcccagctataacaaatgagcacagtgggggaggagctgagattaaataatgaaccatgtattgagacacataaagtgacactccaaggttaaaacaatcttcgcttttaaattggcattgatttatgtgatgcctgctccaagccgtggacctcagctcatcctctcgcagcagctccagcacttgcagagctcagattctgctgaggcagctacccatgggagggtgagtagcacgctcctcatacgtgccccctccctgctccaagctaagagcctggatagttcatccctcatcccagcactctgcgcttatattttggtcctcacacagaatggatctattctcctacacatcccctgcaccatcctgaaaagaaacaggggcataagaaagctctcccttcacagcaaaaatcagaaatagaagataaaaaaaaaaaaaaaaaaaaaaaaagcacaagagcgactcactggagagcaccgaagccagaacgatcacgtgtgctctcacatgaccacttgaggctgcaaagatttaaaagggaatatgtttccttctctatcatggaaataattttcaggcagctgctctcatcctgtttggttgtttgcagagtagcgtcaacaatcaacaccgagtacacttctcccctgaaggaaattctgcttcctacccagccaaaccgctctttattgtcttcagctcagggaagtttagttaaaatttaggctccatcaacttttaaagtctcgagctccctacatggatgtagtgttatctatggaaactgagtaccgaggggatatgtttttgaagatctacattgaaaatgcacagttatttcatcttgcacattaggctctgtctcagcttttagacagggatgtgatgcctctcagctactaattccagtgttcccttctccaaacagctgatccaaaacaaaagatagcaaaatgatgcattctccttccatatgtcaaagtatagcttcatgctggacaaactagaaggaacagccaactcttgtccaaaaagagacattcaaggtcttttcaaacacagaattatatccagtgaggatacagaaagcaatgtcaactggaggcaagctagagtcatcagagaggaagaagccttggttgtggaaatgcctctatgagatccaggtgtaagatatttttttcaattactgatcaatggggaaaggcctagcccactgttggtggtgccatccaagaattggtgatcctgagttatttttttttaaagcaggctgagaaagacatggtcatatgaaagtagtgatatcctcatgctgtaactagctatatgtgccaccatgttgtcaaattaagttcacaatctgaaatcttgctaatcatgtgactacatgtgaataagtgaaacaggttcacaattgcagtcctcaatgaataacttcattttccccatgcccaggatattagagcatatttctaaaagcatgaacttgagttggggtgctgactccatgttctagcagggagtttacgcccttggtttctttcgttaatttagccataggaaattgctgctgactgtttactgtttggaagctacaaacaagtggatggatggatagatagatagatagatagatagatagatagatagatagatagatagatgataaaggtacctccactgatttaactcatatatgtctactacagagtgttccaaccaaatatttctcttctaaacaatgagcacagccttgagttctcccactgcctaacaatggttccaaagttctccttggcatttcccatatgagaacaaaaggacactgctcacacccagaattcttcagctgagcaggcaaactcacaagccacagaccatgactgttaacactgtttctcagagacttctaatgagcataaacaaaaattattccactggtaaaattatttggaagacttccaagaacattcataatggcaccaaggacctaagtcccttcccccaatgacagtagtcacatgaagcagaattacatatctagaagccatgagacgtctgtcttgttatcctgtgagcctggctaattgtcttgttgccagtagcttgggtaaagaaggggagagaaccttacgtgtcaatgagtaacgctactgaagttcaggttcaaggcaggtgcattattaacacaagaatggagcactagggactccaaggaccacggactaactggatttcctggcctgactactgagtaaagacaagtatattgccttcctgactaggctgctgccctgagcagaccttgggcggaactcctttacttgtcccacaacactcagaggaagctccactcccaggtactctaacacacccaggtccacaggattccaggattccaggattccaggattccaggatcccaggatcccaggaccccaggtgcttggtcataccaggatctcaaggtctcagaggcaacttgtctcccaggagctctgacacacccaggatctcagaatcacaggatcccagaatcataggatcacagagacagctgaattctgaggagtactgacacaaccaggatcacagggaggacaggctccagttagatatattgaaggcaggtaaccagatggtgggtggcaagcataagaacataagtaacagaaaccaaggttacttggtgtcatcagaacccaattctcccaccatagcaagtcctggataacccaacacaccagaaaagcaagattcagatctaaaatcacttcttatgatggtgatagaggacttttagaagggcataaataactcccttaaagacatacaggagaacacaggtaaacagctagaagcccttaaagaggaaatacaaaaatcccttaaataattacaggaaaacacaatcaaacaggcaaaggaaataaacaaaaccaaccaagatctaaaaatggaaatagaaacaataaagaaatcacaaagggagacaaccctggagttagaaaacctagggaaaaaaatcaggaaccatagatgtgagcatcagcagcagaatacaagagatagaagacagaatctcagaggcagaatataccatagaaaacattgacacaacaatcaaagaaaatgcaaaatgcaaaaagcttctaacccaaaacatccaggaaatccaggacacaatgagaagatcaaacttaaggataataggtatagaggagagcaaagattcccaactcaaagggccagtaaatatcttcaacaaaagtatagaagaaaacttccctaacctaaagaaagagatacccctgaacatgcaagaagcctacagaactccaaatagactggaccagaaaagaaattcctcctgccatatgataatcaaaacaccaaatgcacaaaacaaagaaagaatactaaaggcagtaaggaaaaaaggtcaagaaacatacaaaggcagacctatcagaattataccagacttcttaccagagactataaaaacttgaagatcctgggcagatgttatatagactctaagaacacaaatgccagtttaggctactatacccagcaaaactctcaattaccataggcagagaaaacaagatattccatgacaaaaccaagtgtatacaatatctttccataaatccagccctacaaagaataatagatggaaaataccaacacaaggagggaaactataccctagaataagcaagaaattaatctttcaataaaaccaaaagaagatagccacacaaacataattccacctttaacaacaacaagaaataacaggaagcaacaatcacttttccttaacatctcttaacatcaatggactcaattcccaaaaagacatagactaacagactgaatacataaacaggacccagcattttgctgcatacaggaaatgcacttcagtgacaaagacagacactacctcagagtaaagagctggaaaacaattttccaagcaaatggtctcaagaaacaagctggagtaaccattctaatattgaataaaatcaactctcaaccaaaagttatcaaaaaatgataaggaatgatacttcatattggtcaaaggaaaaatctaggaagatgaattctcaattctgaacatctatgttccaaatgcaaagacacccatattcataaaagaaactttgctaaagttcaaagcatacattgcacctcacacaataatagtgggaaacttcaacaccccactctcagcaatggacagatcatagaaacacaaactaaacaaagacacagtgaaactaacagaagttattaaccaaatggttctaacagatatttatagaacatttcaccctaaagcaaaagaatatatgttcctctcagcacctcacagtaccttctccaaaactgaccatataattggtcacaaaacaggcctcaacaaatacaagaagactgaaataatcccatgcaacctatcagatcaccatggactaaggctggtcttaacaacaaaaacaacagaaagcacacatacactcataagctgaacaacattctacttaataataacttggttaaggaagaaataaagaaagaaattaaaggcttttagagtttaatgaaaaaatgaagacacatcataccaaagtttacgggacacaatgaaagcagtagtaacagaaaaactcatagctctgagtgcctccaaacagaaactagagagagcatacactagcagcttgacagcacacctagaagctctagaacaaaaagaagcaaatatactcaagaagagtagatggcaagaaagaacaaataggaaaacacagaactatacaaagaatcaacaagatagataaatccttagccagactaaccagagggcccagagacagtatacaaattaataaaatcaggtggcgcacgcctttaatcccagcacttgggaggcagaggcaggtggatctctgagttcgaggccagcctggtctacaaagtgagttcaaggacagccagggctatacagagaaaccctgtctcaaaaaaccaaaaccaaaacaaaacaaaaaaaagggagacataacaatgaaatatatcttaaaataactattctatttgttgaatatcaacaggtgaaaatattaaaatcatgttctgcaaacatcatggacattttattgataatctgtctcactgtgcttgaaattagcattttctttttttgtgtgtgtgtgtcaaaattcttttattttttttccaatgctataccaaaagtcccccatacccacccacccccactcccctacccacccactccccctttttggccatggtgttcccctgtactggggcatataaagtttgcgtgtccaatgggcctctctttacagtgatggccgactaggccatcttttgatatatatgcagctagagtcaagagctccggggtactggttagttcataatgttgttccacctatagggttgcagatccctttagctccttgggttctttctctagctcctccattgggagccctgtgatccatccattagctgactgtgatcatccacttctgtgtttgctaggccccggcatagtctcacaagagacagctacatctgggtcctttcgataaaatcttgctagtatatgcaatggtgtcagcgtttggatgctgattatggggtggatccctggatatggcagcctctacatggtccatcctttcatctcagctccaaactttgtctttgtaactccttccatgggtgttttgttcccaattataaggaggggcatagagtccacacttcagtcttcattcttcttgagtttcatgtgtttagcaaattgtatcttatattcttgggtatcctaggtttggggctaatatccacttatcagtgagtacatattgtgtgagttcctttgtgaatgtgttacctcactcagggatgatgccctccaggtccatccatttggctaggaatttcataaattcattctttttaatagctgagtagtactccattgtgtagatgtaccacattttctgtatccattcctctgttgaggggcatctgggttctttccagcttctggctattataaataaggctgctatgaacagagtgtagcatgtgtccttcttaccagttgggccatcttctggatatatgcccaggagaggtattgctggatcctccggtagtactatgtccaattttctgaggaaccgccagacagatttccagagtggttgtacaagcctgcaatcccaccaacaatggaggagtgttcctctttctccacatcctcgccagcatctactgtcacctgaatttttgatcttagccattctgactggtgtgaggtggaatctcagggttgttttgatttgcatttccctgatgattaaggatgttgaacattttttcaggtgcttctctgccattcagcattcctcaggtgagaattctttgttcagttctgagccccattttttaatggggttatttgattttctgaagtccaccttcttgagttctttatatatgttggatattagtcccctatctgatttaggataggtaaagatcctttcccaatctgttggtggtctttttgtcttattgacggtgtcttttgccttacagaaactttggagtttcattaggtcccatttgtcaattctcgatcttacagcacaagccattgctgttctgtccaggaatttttcccctgttcccatatcttcaaggcttttccccactttctcctctataagtttcagtgtctctggttttatgtgaagttccttgatccacttagatttgaccttagtacaaggagataagtatggatcattcgcattcttctacatgataacaaccagttgtgccagcaccaattgttgaaaatgctgtctttcttccactggatggttttagctcccttgtcgaagatcaagtgaccatagttgtgtgggttcatttctaggtcttcaattctattccattggtctacttgtctgtctctataccagtaccatgcagtttttatcacaattgctctgtagtaaagctttaggtcaggcatggtgattccaccagaagttcttttatccttgagaagactttttgctatcctaggtttttttgttattccagatgaattcgcaaattgctccttctaattcgttgaagaattgagttggaattttgatggggattgcattgaatctgtagattgcttttggcaagatagccatttttacaatgttgatcctgccaatgcatgaacatgggagatctttccatcttctgagatcttctttaatttctttcttcagagatttgaagtttttatcatacagatctttcacttccttagttagagtcacgccaagatattttatattatttgtgactattgagaagggtgttgtttccctaatttctttctcagcctgtttattctttgtatagagaaaggccattgacttgtttgagttaattttatatccagctacttcaccgaagctgtttatcaggtttaggagttctctgttggaatttttagggtcacttatatatactatcatatcatctgcaaaaagtgatattttgacttcctcttttccaatttgtatccccttgatctccttttgttgtcgaattgctctggctaatacttcaagtactatgttgaaaaggtagggagaaagtgggcagccttgtctagtccctgattttagtgggattgcttccagcttctctccatttactttgatgttggctactggtttgctgtagattgcttttatcatgtttaggtatgggccttgagttcctgatctttccaaaatttttatcatgaatgggtgttggatcttgtcaaatgctttttctgcatctaacgagatgatcatgtggtttttgtctttgagtttgtttatataatggattacattgatggattttcgtatattaaaccatccctgcatccctggaataaaacctacttggtcaggatggatgattgctttaatgtgttcttggattcggttagcgagaattttattgaggatttctgcatcgatattcataagggaaattggtctgaagttctctatctttgttgggtctttctgtggtttaggtatcagagtaatagtggcttcataaaatgagttgggtagagtactttctacttctattttgtgaaatagtttgtgcagaactggaattagatcttctttgaaggtctgatagaactctgcactaaacccgtctggtcctgggcttttttttggctgggagactattaataactgcttctatttctttaggtgatatgggactgtttagatggtcaacttgatcctgattcaactttggtacctggtatctgtccagaaatgtgtccatttcgtccaggttttccagttttgttgagtatagccttttgtagaaggatctgatggtgttttggatttcttcaggatctattgttatgtctcccttttcatttctgattttgttaattaggattttgtccctgtgccctttagtgagtctagctaagggttaatctatcttgttgattttctcaaagaaccaactccctcgtttggttaattcctttgaatagttcttcttgtttccacttggttgatttcacccctgagtttgattatttcctgccgtctactcctcttgggtgaatttgcttcctttttttctagagcttttagatgtcttgtcaagctgctagtatgtgctctctcccgtttcttcttggaggcactcagagctatgagtttccctcttagaaatgctttcattgtgtcccataggtttgggtactttgtggcttcattttcattaaactctaaaaagtctttaatttctttctttattccttccttgaccaaggtatcattgagaagagtgttattcagtttccacgtgaatgttggctttccattatttatgttgttattgaagatcagtcttagtccatggtggtctgataggatacatgggacaatttcaatatttttgtatctgttgaggcctgttttgtgaccaattatatggtcaattttggagaaggtaccatgaggtgctgagaagaaggtatatccttttgttttaggataaaatgttctgtagatgtctgtcaggtccatttgtttcataacttctgttagtttcactgtgtccctgtttagtttctgtttccatgatctgtccattgatgaaagtggtgtatttaagtctcccactattattgtgtgaggtgcaatgtgtgctttgagctttactaaagtgtctttaatgaatgtggctgcccttgcatttggagcgtagatattcagaattgagagttcctcttggaggattttacctttgacgagtatgaagtgtccctccttgtcttttttgataactttgggttggaagtcgattttatccgatattagaatggctactccagcttgtttcttcagaccatttgcttggaaaattgttttccagcctttcactctgaggtagtgtctgtcttttcccctgagatgggtttcctgtaagcagcagaatgttgggtcctgtttgtgtagccagtctgttagtctatgtctttttattggggaattgagtccattgatattaagatatattaaggaaaagtaattgttgcttccttttatttttgttgttagagttggcattctgttcttgtggctgtcttctttttggtttgttgagtgattactttcttgcttgttctagggcgtgatttctgtccttgtattgcttcttttctgttattatcctttgaagggctggattcctggaaagatattgtgtgaatttggttttgtcgtggaatactttggtttctccatctatggtaattgagagtttggctgagtatagtagcctgggctggcatttgtgttctcttagtgtctgtataacatctgtccaggctcttctggctttcatagtctctggtgaaaagtctggtgtaattctgataggccttcctttatatgttacttgacctttctcccttactgcttttaatattctatctttatttagtgcattgaaattagcattttcttaatgtttaacttcaaagagtttttgctattttgaaagttttaaaatatatttactgataaaataatttctctccaaaaaatacaaaaaacaaaaaacaagtatatcatgttctgacagctgtgttggttttctggactaaagtcatcagaaaaatcaagatttggaaataccattagacttgaagatacagaggaattgctatacccaagctacctcagctatggtgccctggaggtcgctggcatacattagcatataccctcaccagagacatggcatgctcttctgctttatggtccaagcaactggagtttcaaaatataaagattccatataaaaacataatgtcttatataaatgcacattccagcttccctaaaactacccaagaaaggtccagctagggggacatgttgatgttctaaggcacagtgactggcaccacgtcaaaatgacaagtgccatcaggaaacctctgaagtttgtttctgggtattaagaaggctaaactggatggccaactgaatatcaggcattttaaaaaattataaaagcaggaatggtggcctgtgcctgtaatcccagcaatagtgaggttaaaaaccagagaatcggttgcttgaggtcaggcatggctaaataataagtttaataccacgctgtcacaggagacccctgcctcaaaaaataaaaataaaaataaaaataaaggaaaggggaaaataaatgggagaataaaacaattccagatagaaagggaagcctagacaagatagacaagtgggataagtgctgatttcctatcctgacttttttcaattgtaacataaaattattactcacaaaatcctttcagaaatatattgttactcccccatcttttcctctcaattgtatgtgtgtgtgttttcattttatcttttaatttgttgttatgaattgcttctagaattaaatacacaagtctaaatgtgaggtaggaagagacatgacaagcatagaaactcatatttgtttaaacaatgcctagactttggggttagacaagaatacctgggagcgagcactgagtcgcttgaggagaaggcctgaaccaagtcttaagaaagaccaaccttctacagttaaatggggagaggagaaagaagcctgagacagagacagatgcagaaacagacgagtgagcccagcgagaggccagggcaactcaggtgccactcaaaccgcattaaatccaggaccacaggtattcttcaaaacacaagagcttaaatttctgtgccatggaacagaagaaccaccagcagcccacacagtgacacatatacagggactcaactttggagaagtcctggtcccattcagatgacctactatgcatgtagttttccagtacgtgagttcttccacggagatgggggcagttggaactggtcagtgttcacgtcccggaggttagcacgagccacgagcacatgctgttctgaggtgtcaggttgatttcaggttcccagaagcttaggggagtaaggatttattttctggaccaatcttatagaaattccctgatgagaatctgccattctcttcccgtctttaataatggtctctcagcacacagaggattcagcagatgaagtgcttcctagccatttgtatttgctttctccgcgtgaaggcaggcacagtcaccagcccagggtgggcagagtcaaattaaggaaatgaatatttcagagtagaaagaacaggggactcggaatgcgcctgaagctggcagatacgcatatggagaaggaagtcttggagctgtggtgtttctcctggagagatcaccagcagacagacagacagacagacagacagacaggatcttcaacattggagaaatttaacagagttaaatattaattacattaacaggaataaaatgagaaacacaaaaacgtctgccaagtcgccaaatattgttaaagtactaacatttgactagcaatttttcaagacagaacacattaaaaacaattggactttttgttgtcattttttacccagggaactggtgagcacggagctagtggccccaaaggagaaaaggtaatcctgtgttgttgttgttgttgttgttgttgttgatgatgatgatgatgatgatgatgatcaaagggattaagcactttcacctataggggcagcagtcccagtgagcaggaactttacctgcctgctgaccagcagctggatgctgccccttgggggcgctactgagcagaggcgggctacaagagaagggatgtgtcaagagaaacatccttaataatgatccagaaaggagaaagatttatacgatttgaaggaaaaccatagtacaaaggaagggtcaggatcccacaagaaaacccacagaaggaactaacccgggctcataaggactcacagagactgaaccaccaatcagagagcttgcctgggcctgacctaggcctattgcacctacgttacagttgtgtagtgtgggtttcttgtggaactcctaacaatgggagcacaagctgtgtctctgatgcctgcctttgggaccctgtcggcctgctgggttgtcctgtccagctttaaaaggagagcaggtgcctagtcttacttcaatttgatatgctgaggttggttgatatccacaggaggtcacagatactgagggggagtgaatgggagtgggggaacagagaactgcagccaggctgttaaaaatttttaattaggaaggaaggaaggaaggaaggaaggaaggaaggaaggaaggaaggaaggaagtcagaaatccttgcaggtagcaaaaaccataggaagaaagagccaatcggcaaaatgcttgtgggtcaagctcactagttaactgttcttaaagcaaaggaggctgtcgtgggagtacttcgttttgttttggtgaggttttaccatgcacagtagtagtctagccaagcagttatttcaaaacgagttttcaagataaaacaccaatatacttctgttacattttccttgtcctcggttggaagtcctgctttattagctataaaagaatggcaggttaacttctctatagaaaataccactttattctagttggattgtaaaaccgtgatgaccttggactgtgaatgtggcacggtcagaggaaaaatttaaaagtaaagaaaaatgcacattaaatctacagacaaggatatgaaggtctggaaatacttttaaaaggcagatggcctgtgagagctaccttccttctttcacccagtaaaagttctcttgattgagggcatgatacttttcgacacaagtgcaagaaatatgacttctgtgctttataaatcagcacagccaacctattcaaaagattgtgtatctctcaccaggaaaaatcgctaaaagatcatctcagcaggaacagtgagttccttatagactagtcattcaagaagaaaattctctgggatacataaataaaaccccgacattctgaaaaaaaacaatttaaaaatgattctttagcaatccaagtcactcccgggtcttggattttgaacaaagctatttcctctgaagcagcaccttatagaatcatatcccaacctcacaaatggattgcattttaagtatttgctatttgacatatgcagactcgggacgcagggacactaagcttgtcacacaggacagctgagtggagaaggtgggggtgtgatactcttaaagcatttaaatgatgagtcacttcttggaacaaaacagctggcttctgtgttgccctcttcattagcaaacatatgtcatttagaaatgcttaagaccttgctgatgagaaatttgatgctgtaaaacaggtgtatctcaaactccagggaccattcttactgcttggaatctttttaattgcttcagaatgttaagtggagttagaaaaaaaaaaaaaccgagagactatctgttccatcttcctacccacataaatgatttgtctagaagagtctgtagggaacttgatgctgtgagtgctatgtacctatgaaagcatttttacaaattatcattaatgaaggaacagctctgccagtaagccatgtatcgagtcacagaaagcctgagtgtagcaactgcttgaagaaagtccacgcatctacttcctgtctgttctcgatcaatctcctggctttttagacctgtgtctttcacagttggtggatctctgcttatgcttgtgatatgatcaggggttccaaaccctgcctgtacacaaaagcaccaggacagggcactggaaagcctgttcctgagccccatgcgcaggggctccgaggagagggaaaccagtatctgtctcttaaatacatggacatttggttgaggctgggagccactgtgggcttgaatgagcattagctttgggatcacaagctggctatggtataaactgtgccgttaccttggaagccatctccttaccctaagtatcaggttcccaggatgtaaagcagacataatcatctacaggaagaatgatgggaggattaaaggctaacgagatgaattttcctggaagcccaatgctcagtgcaaattagactgtcaataaacactggtttttcttatttgctctccaccttctgctcgggagcgctcatttagctctttccgaatgagccatttccatccttcctgcctagcctggttcttctttgccttcctcccaataattctgaagggaggagactcgagttggaaagtagaaaaaaagatttaactaacaatattctttaaatccttcattttgaatagatgcgtatttataggtaatttctagccccttcacttgctttctgtttctgctatattagatgagtattcttgttagggctattattccttaatgtctgtatagtgggatcatatcacaaacctgacaaatgacatgaaactcactttagagttttacaaaccaactatgcatgggtgcctaaagtggtcactgtcttctctaccttccaacgttttacagaatttactatcttaaaaaaaaaaaaaaaaaaaaaaaaaacaccagcttcaatgtactaaagtacagatagagatatacaaagatgtattttgctcggatcaaaccatatgccagggctctcagaagatggttcagaagctaagagcacttattctccttactaaggatttggggttagtttccagcacccataagaagcagctcataactgcctgtaactctaactccaaagcatatcacatcctcttctggcttttttgggtacctgcacatgtggcactcatacagacaagcaggtgtgcacacacaaagtaaaaaaatatttaaggaaatatagctagcacactttaaatttcatgtccattacctcaaagaacttattagttcttaagcttaaaattcaaagggacccagagaaaaggctaggaattaagaaagatatatacctgtagatacaacagaaagatatatacctgtagatacaacattaagtattgttttacaaaattcacctcgggctggaagaaaaatgttcagaactacctgtggtctagtttaacttaagtctagtttacctgtttaacttaagaatcaagtgactgtcactctggaagtcagtctggaggttcctcagatttggacataatactaccggaagatccagcaatatcactcctgggcatatacccagaagaagttctaactggtaataagaacatatgctccactatgttcatagcagccttatttataatagccagaagctggaaagaacccagatgtccctcaacagaagaatggatacagaaaatgtggtacatttttacacaatggcgtactactcagctattaaaaacaatggatttatgagattcttggacaaatggatgtatctggaggataccatccttagtgaggtaacccaatcacaaaagaagtcattagatatgcactcactgataagtgaatattagcccagagacaaagaacacccaagatacaatttgcaaaacacaagaaaatcaagaagagggaagaccaacgtgtgggtacttcattcctccttagaatagggaacaaaatacccatggaaggggttacagagacaaagtttggaactaagatgaaaggatggactatccagagactaccccacccggggatccatcccataatcagccaccaaacccagacactattgcatatgccaaaaagattttgctgaagggaccctgttatagctgtcacctgtgaggctttgccagtgcctggcaaatacagaagtggatgctcacagtcatctataagatggaacacagggcccccaatggagaagctaaagaaagcacccaaggagctgaagggatctgcaaccctataggtggaacaacaatatgaactacccagtacccccagagcttatatctctagctgcatatgtagcagaaggtggcctagtcagctatcactgggaagagaggccccttggtattgcaaactttatatgccccagcacaggggaacgccagggccaagaagtgggagtgggtgggtaggggagcagggtggaggggaaggtatagggaactttcaggatagcatttgaaatgtatatttaaaaatatctaataagaaagaaagaaagaaagaaagaaagaaagaaagaaagaaagaaagaaagaaagaaagaaagaaagaaagaaagaaagaaagaaagaaagagaaaggaaggaaggaaggaaggaaggaaggaaggaaggaaggaaggaaggaaggaaggaaggaaggaaggaagaaagaatcaagtggttgttgggaatgctgataaatactttaaaaaaataaatccagtgcttcagctctgatgtctggtcacgatgtcactcctgcctacaagaaagccctctccaactgtattttctgaaaatgcctttctatgtcacatacaaatccctcttcaacgttttgaccagcacatcttagacatttccaaactgctgctgtcaccaagtcagcaagaatgtcatctttgtctacagccttcatctacgcctcaagagaaacactgcagacagctggcagattcatttctctctctataatcactgactacacacacacacacacacacacctaaaataagaaagaagtcctcagaagagaacaagagcagactgtcgtgtcatttaaaggcaaaaataaagaaataatgattttgggtccaccagaacaaaactataattcttttctcctctgtgtgtcctgtccttgaaaagtgattaacattgttccacattaattttaaatgtcctaatgaaatgttatgggtttctagaaggcctcaggcatggaggagagcaaagacaccttattaggaagacagcctggctagattcagatcttcacgaggccctgaccccggtgggattctgtaggataagggacatttctctacacttcagcacttctgcttttccttggcagggcgatactgggctgcctggatttccagggtctgttggccctaaaggacacaaaggagaacctgtaagtattttagctttagggaagaggaagaaataaaaaaataaatgaaaaattaaaaatattttcccaaactaaccccaacttcatggtgttttaaatctaaaactgtaaacagcattgaaatggcaagtacacaccatgccaggcaccagaccctctctatcttaattcacttaactcatataaaaagtccccatgaggtggcccattccgtacacaggtttggctggttccagattccgggctctaaaatgattaagttgcctggatatgactaaataccagatctaaaatgaaaaacacaatcaatatatcaagactggtacaaatttatctttaaaattgaaaatgcttcaatctctctctctctctctctctctctctctctctctctctctcctcaaacaactgttctcagtacatctctgaaattattttcctctctgttttctgtgagatcgaagtgagatcacaagctaacttccaatattgctgtggctggtttcttggaaaacttctctttgggaggaaaggaaaaaaaaaagaaaaacaaacaaaaacccttccacatcatttatattcaaatagaactgctgaagagtttgcaaacgtgtggtgtgtgtgtgtgtgtgtgtgtgtgtgtgtgtggtgtgtggtgtgtgtggtgtgtggtgtgtgtggtgtgtgtgtgtgtggtgtgtgtgtgtgtggtgtgtgtgtgtgtggtgtgtggtgtgtgtggtgtgtggtgtgtgtgtggtgtgtgtgtgtgtgtgtgtgtgtgtgtggtgtgtgtgtggtgtgtgtgtgtgtgtgtgtgtgtggtgtgtgtgtgtgtgtggtgtgtggtgtgtgtggtgtgtggtgtgtgtggtgtgtgtgtgtgtgtgtggtgtgtgtgtgtggtgtgtgtgtgnnnnnnnnnnnnnnnnnnnnnnnnnnnnnnnnnnnnnnnnnnnnnnnnnnnnnnnnnnnnnnnnnnnnnnnnnnnnnnnnnnnnnnnnnnnnnnnnnnnnnnnnnnnnnnnnnnnnnnnnnnnnnnnnnnnnnnnnnnnnnnnnnnnnnnnnnnnnnnnnnnnnnnnnnnnnnnnnnnnnnnnnnnnnnnnnnnnnnnnnnnnnnnnnnnnnnnnnnnnnnnnnnnnnnnnnnnnnnnnnnnnnnnnnnnnnnnnnnnnnnnnnnnnnnnnnnnnnnnnnnnnnnnnnnnnnnnnnnnnnnnnnnnnnnnnnnnnnnnnnnnnnnnnnnnnnnnnnnnnnnnnnnnnnnnnnnnnnnnnnnnnnnnnnnnnnnnnnnnnnnnnnnnnnnnnnnnnnnnnnnnnnnnnnnnnnnnnnnnnnnnnnnnnnnnnnnnnnnnnnnnnnnnnnnnnnnnnnnnnnnnnnnnnnnnnnnnnnnnnnnnnnnnnnnnnnnnnnnnnnnnnnnnnnnnnnnnnnnnnnnnnnnnnnnnnnnnnnnnnnnnnnnnnnnnnnnnnnnnnnnnnnnnnnnnnnnnnnnnnnnnnnnnnnnnnnnnnnnnnnnnnnnnnnnnnnnnnnnnnnnnnnnnnnnnnnnnnnnnnnnnnnnnnnnnnnnnnnnnnnnnnnnnnnnnnnnnnnnnnnnnnnnnnnnnnnnnnnnnnnnnnnnnnnnnnnnnnnnnnnnnnnnnnnnnnnnnnnnnnnnnnnnnnnnnnnnnnnnnnnnnnnnnnnnnnnnnnnnnnnnnnnnnnnnnnnnnnnnnnnnnnnnnnnnnnnnnnnnnnnnnnnnnnnnnnnnnnnnnnnnnnnnnnnnnnnnnnnnnnnnnnnnnnnnnnnnnnnnnnnnnnnnnnnnnnnnnnnnnnnnnnnnnnnnnnnnnnnnnnnnnnnnnnnnnnnnnnnnnnnnnnnnnnnnnnnnnnnnnnnnnnnnnnnnnnnnnnnnnnnnnnnnnnnnnnnnnnnnnnnnnnnnnnnnnnnnnnnnnnnnnnnnnnnnnnnnnnnnnnnnnnnnnnnnnnnnnnnnnnnnnnnnnnnnnnnnnnnnnnnnnnnnnnnnnnnnnnnnnnnnnnnnnnnnnnnnnnnnnnnnnnnnnnnnnnnnnnnnnnnnnnnnnnnnnnnnnnnnnnnnnnnnnnnnnnnnnnnnnnnnnnnnnnnnnnnnnnnnnnnnnnnnnnnnnnnnnnnnnnnnnnnnnnnnnnnnnnnnnnnnnnnnnnnnnnnnnnnnnnnnnnnnnnnnnnnnnnnnnnnnnnnnnnnnnnnnnnnnnnnnnnnnnnnnnnnnnnnnnnnnnnnnnnnnnnnnnnnnnnnnnnnnnnnnnnnnnnnnnnnnnnnnnnnnnnnnnnnnnnnnnnnnnnnnnnnnnnnnnnnnnnnnnnnnnnnnnnnnnnnnnnnnnnnnnnnnnnnncttgaacctggagctcaacaattctgcaagcctatctagtcagcaaccaataggaatcctgctgtctctacctccctagccctgggatggcaaacaagcattgccctgccctgctttgacgtaagttctgtgaatgaaactcattcttcatccttaagcaaaaaaacaaaaaaacaaaaaaaccaaccaaccaaccaaccaaccaaaaaaccagaattagcatgtgtctagccatttttatgaaatgcagcacaccttttaaaattgctttcacctgtattccagagtgagttggggatatgggtttactggggatgagggatggagaggtcagtaaaatgctgtagtggcaaacaggaaagcaacaggaaaaacattccgtgctaccaagctgaactccactgctgcttcggcttcacttagaccccttctttgatagtgatcgtctctgtcagctttaaaatctccagcacgcccatggacaccataattgaccgtctggtccctttatcctcagtgtctggtccaggcctaccgaagagcctttactagtgtcgtccagctgaggatttcaaagggtctgggaactattctgggcttcttcctgctgctcacccgctcccatgagccactcacaccatgtcctaacccctcctcggggtctccactctctcctagcccaatgatacccacctcgattttaactttgcaccatgggagatgtgacaagtaggacacagagcagaaaaggactttcttccactcctgctgtactctaaacaagcgtgcagcctcgaagccgagagttctaactcgagttccgggtggcgcctagaagcctgtgtttcccacatgtgacattggtgttgctctagcatcactgcgggttggagtagtacatcctttctaggcacgagagacctttctctctttaacgcattccctctggctttcgttcatgccttcagtgttcgtggggagcctggctacccatttgggccaatctgagccttggcctttttattcagcagaaataacttcttgggctggagggatgggtcagtggttcaaagcactggctgctcttccaaaggacccaggttcaattcccagcacccagacagtggtttaaaaccatctgtaactccagctctaggggatctgatgtcatatcatgatcaccatgggccccacacacacatgtggtgcagacacacatacaggcaaaaaccacaattcccaaaatttaatagataagggaaagtggaactctaaaacctaaaatggctaccccaggtagtcctcaggaaagatgagattaaatagcaagcctgtgcttaaccggcatcctacaactcgacgtaggtttttgaggcagacctgttattccgagctaatctagggatccggctgcaggagcacaagtttgaatagcttcggatacagactgagttcaggtccaaacttggcaacttaattaaatcttatctcaaagctaaaagacaaaatgtgaggcctgacatacagctctatgttaaagcattgccctgtattaattcccaaggagcaggaattgaacgttgatttcgggcacaccgtgactctttcaagaccgctaagacataagagcaagcagaggcagaagcaacgcagcccactgcgagtgcctcaaatcttaacagttagtcatgtgcagaatcctagaacaaaaatctgaaaagataaggccctggtctaacatgtaaaaatacatccataataaaagatgagattctgttaggtagataacagcttgtacactcgcaccgagtaacagatatgtggctgagcccaggtaagttagccctcactcacactataggggaagcgcagttcactaggaagaggtgggtgttcaaatccctacacactcagtcaccaagctgatttggatcacatagctttatccttgggtacacacaacctctgtcaccactgaaaaggaagtgagactgaagaatagtgagggaggcctctcactgtctctcacttgccagcaactcctgtcatctctaattacaggtcactgctagagttaggtactcgatcgagtaaaattacaaaacagctagagaatgtatgagaaggtgaccctacatgcctagcatatagaacatgagaatctcaaagacaggctttcaataaacactccctactcccacccccaaatgaggtatccaagaaaatagcagtcccatgatgattcttacatttctcttgatttccatacatgaaagaactctttaaagtgcatagtttccttcttattggccattcactcaattcaaataataaataaatctgattttaaaatcaaagcaggcagatagaaacaaagaaaaccttaaaatcaggctgcccaagttttatataaaacattctacttttctgtgcctcagtttcctcaaatgtatgtggctatactaagagcaaattcccactgacacctgaggctaactacagtgtgtgtgcctgtctgtgcatgtgtctgtgtgtacatgtttctgtgtggacatgcatgtgcacgtgggtgtgcattgtgcatgtgtgcatttgtgaatgtgtgtgtgtgtgtgtgtgcatgtgtgtgtgtctgtgtgtgcatgtgtgcatgtgtttgtgtaagacgtgaaggttgctaacatagtgactgacatcaaggagagtactggtcagcagagcttatacctcaaatctatctttccagtgaaccccaactccaagagcaaccaacacagttccagtgctgtttatccagtaactaacccctttgtgtcattttgattagtatacaatggacactttaatgagcatccttaaaataatgcttttgtgtgttcaccgaggtgggaaactcgagtgcattcctgccatttgagggctacccccacccatttccctccactttccgatgagtgtatccatcttcatttcacaatcagaagttttagccctgggcagcatttcaatttgactgctgttgggagcctcagcataggtttaaaatgcttagctccatgctcatttgggaccatgaaggaatctgtaaattaattctcacttgcccctgtctgagttgatttctaagtgtttataattgattctgttttctgcccatttttctagggggagcctttaacaaaaggtgaaaagggagatagagtaagtaggtgtttatcactgtcttgggttttctattttattgatttctctctccattttgttgtctggcgcctaatacctttgataaagtaagttttctgaaaattgtactttcttctgttttttttttaactcttatttttaatccttgataagtgctaccatgtgataacatttgaacatctgatttgggttttactggctttcttttgtacttgtatttgcattttacatttgttggggggtagccgtatgtgtatgccacattgagtacttgccttgatatgtctgtgatggtcagaggacaatttgtgggagcctgttctctccttctgccttgtgggccctgaggattcaattcaggtcttcaggatcagcaacaatggcttttactctcttgagtcatcttgccagctctattctggttttctttagcctatgttattcctgagattgcatggggtggggtgaggattccacttttttggtccaaatttgaagcaagcgttattaaatattaaatactaaccaagagatgaactttgatcataatcactccctggaattttgcagctgagtggctcctgggttttcatggacagaactcataggctaccatgccttcccatgaggctttgctattttccaagaattacaactcccagtattctaggaagttacgtggtccttgggcaggtggggcttacaggctaattttgggtactacacctactgctattagtgactagacttcaatgtcataaaagtcatcaagtaagaatatgcaaactaagcactcctttaatcccagcactcaggattaaaggatttctgagttcgaggccaacctggtctacagagtgagttccaggaaagccagggctacacagagtaaccctgtctcaaaaaaccaaaccaaaaaaaaaaaaaaaaaaggaaggaagaagaaagaaagaaaaaaaggaaaggaaaggaaaggaaaggaaaggaaaggaaaggaaaggaaaggaaagaaaagaaaagaaaagaaaagaaaagaaaagaaaagaaaagaaaagaaaagaaaagaaaagaaaagaaaggaaaggaaaggaaaagaagaggaaaggaaaggaaaggaaaggaaaggaaaggaaaggaaaggaaaggaaaggaaaggaaaggaaaggaaaggaaagtctatgcaaactgtaaaacaggcaatgcagactttcagaaaaattgttaaagacacaaattggattttcaagtaagccatggaaaataagaaaatatcttttactaagcacctgggaatagaatcaccagtgcacatctctttattcttctttattctattataatagacatattataatatattgtagaaatatacatgtattatacaatatattttatgtatatgcatatgtgtatatgcatatattatatgcatacatatacatatataaaatgcatattatatatgcatatatgcatatgtatgtgtatattataggtgtgttatataacatatactgcataatgtatatgttataaaagatataatgaatatttatattaagttttatgaaaattatatatatatatcagcctattctatcctgactcatatctgaggttggtgatcagctggtggtgaatgagtcattgctgatgtgtcatgatatcacatgaagaaataaactgaggtgctctgtcacttattagcaataaggattctgaatgttttagggtgagcattgtttgattgcatggtttccataatgtacccctttgttatgtgttaactgatagaaagtcaattaaagtatcaagatgtcccactccatctggactcaggttgaaccatatggtgattgttttatttacagggagaacccggcctattaggaccacagggaataaaggtagtctggcatttttttttctcagtcacagttgctaccttaacgagatggtaaaaataatagtaatatttaactttcctttccactcatgcacttagggggaacctggagatcctggtccccctggtttactaggaagcccagggctaaaggtatgtacttcataaataaatgtgtgtcggaaatcactatttggaaataattcaagaattacagccatcccgcattcaagaaggttttggtgtgccactcattttcatcaagatgatctgggagactttattttgtttccatggtgaccccaccccactggctacaattattacaaacataaacactaggccttttgggatacaatgggatttttaaatcctttttcagagcaaattcacaacagcatccataaaagctttaaaagtacacaatgtcagttaaatctacagccctgtgccacattcctaacaggaagaggatttgagatctatttcctcactgaaattatgcatccctgtgatatctgactttcccaggggaaattctacaggagtgtctcaagataaagcagttaggggactgtgagagagacttgagtggaatgatcccagccagtttaggttaccccatcatcacctgatgctaaaacagacccattaatgaaacatctcagaactatattactaagctttgagcacatgtcagcataatacatagaaagtgagatgctgaaagtctatctctttctaataaaagtcttgttatatctcaccaatattcagatatgatctagttttatgaaaacttaaagtatataccatcttctattttagggtcagcaaggacctgcaggttccatggggcccagaggaccaccaggagatgttgtatgtattgtatcatcactattttgaaataaaattgatgtcagttaatgagctgattatgctacattccccaaaaccataggttaaccccactactcaaattggtcacttctaatgccaggggattaagtggatctgaataaaccaatctttgaaattcaagataactcaattgtcagtagtcaatgctacagcagaatggagaaaaatagaaatatccaaagaaataagagaaaaccaaaagagacagcaagtgtttccaaattacattcatagactcgagttcaaataatcattttcatgctatatgataagctcaatatagcttgctccctctccctctccctctccctctccctctccctctcttcccatatttctacccttgggtaatctcctagtctccccatgggaactgagagctaatcatcaaataatagatcaaaatggagatctggctacaacactcagtgactctgtgcccatgactaggatgctagttggccagacttgagacctggcctcttttcaccatcttgggagtggccctatgacttctttccttgctctcaagcttactgcctgagcctcctggaggcaactggttggccttcatagtgggcttgctaatctgaacatctgatccataagaaatgttatttatccctcctagtcttagctagggttttactgctgtgaacagacaccaagatgacagcataatgcttatattgggacacttcattggggctggcttacagtgtcagaagttcagtccattatcatcacggcaggaagtatggcagcattcaggcagacatggtgctaaagcaggagcagaaagttctgcatcttgatccaactacagacaggaaaggattgtctgtcttctaggcagctaggaggagggtctcaaagcccatgcccaaagtgacacacttcctccaacaaggctccccctcctaatagtaccactccctgggccaagcatattcaaactaccatactcctacaaggcattattgaatcacttcaggaataccttgtggaaagacaccataaaaaaaaatgttaataacacaagaggaaacattaaatactctgcttagacagaactgttggtactgaggaaataaaatgagaattaaaatcaaaaggaaaaaagcccctgtgcaaaagcataataaaaatattttgacatttttagttgggatgtagtgcttgctcccagcccctaccatcccacttccttcttagaaactatataggtgaaacatttcaattactcttttctgtttcccattatggctgttgactgcacagacaggaagccacacatatctccaaatagcgcttcccctaaggctaaacatcaacattaccttgtatatagacgtttaaattcagttctctgacaaagatgcatggctattacactaagagatgttctaactgctagttttctttcttcttgtattttctagggattgccaggagaacatggtattccaggaaaacaaggcgttaagggagaaaaggtagagtttcgattttacatttgtatattatttaagtagatagaaagaaaagatcctaatgccgtggaagaagcacaagatttcaaggcttgagcctcacatcagtacagggacagatgttcatacaaactgtgtccgggtgtccctggtgccatatatcattgccatgatggagcacagaaacttcagatgagaaaatgagccaacctggaagtggagatcttagggctgcggtcaagctgtagaatctcagaagcctcttagtcttttactacctgcttcttgatgtgtcctatgcatattaatactgcattcctctcagggaataataaggtgtttcgatcatctaaaaacgcttcatgaatagacactctctttgttcctgtgtttacacacaagtcggtgttttctagtactgctaaaccttgtgtagcagaactcatgtcagagctcgaatgtgtctaagatggtaagtagagtgcccggactgagctaggcacttggtaaatgcactagaggggctgaatttagaacggaacataggatgaactttgattggctgtgacaacataaagcaatggaaaccactgtctcccaacctcccactatgaacttcagcagaaaaagaaagaatcgtctcttgttttccacagggagatccgggtggaaggctaggccctcctggacttccaggtctgaagggtgatgctgggcctccagggataagcctgccagggaaaccagtaagtactaccctatgactaggggtgtccctgagcgctcattcactgctaattctgagcccccagttttaagacacaagtgtgatttttttttaaagcctaccccaaagaaaatttatcctataccctagcacagaaagataagacattttgaatgtttcgcagatgataagcaagcacacaacactttccatgtcatcggagatgtttgaaaggtgtcaagactttaggtgctgatttctgagtgattgaaagaacaactgctccacaccaccttcccagaggtttaggctacaaccacagaccatcactcatagaaagtgtgtgtgatccacattcttctcaggacactggaaactgtatcacctgaaaacccaaaaggcaatatactcatttgatttgcccattttctcaaccctctttctcctattacatcaacaactaatggtgatcattctgaagattagatatttaatttcatagataaaacctcttatattttaagctaattattcaaaatctataaccttgtaaaatagtccctctgtatttaataagagtcttactcaagaaaaatgaaggctagtgagtaaatcacggttttgaattatgacttctaattttttaattatttagaaaaagaaatgtagtcatcttgctttttttttttttccttttaggggttagatggaaatccaggatcacctggtccacgtgggccaaaggtatacgaatttcatagctaattttagaagaattaatagttaagaaaaacagaactagaaatgtcttgtgcctcaaattaattagagtctttggttttcacagggtgaaagaggtctgcctgggctccacggttcccccggggacacaggcccaccaggtgtaggaatccctggtagaacagtaagtaatattcagatgtttattgaaacccattggttgtgttgttatgtgtctactcttatttagtgcagtcctcaaaatcttacacaaagcagtaagtcgaggaaaagaaatagaagagtttcaaatagaaaaggagggattcaaaccatacctgtttagacacaactcaatctttatgcttaaaagaccctgaaacattgctagaaaaattttagagctgaaaaattttcagtaacaaagcagaacacagaataagcattaaatgtagcagcatctctacatactattaaaaaacttgacaagaaagatcaagaggagagaaccttactcaataagtgctggtgtggggacttcctaaaaataagcctcaatggaaacttgaaggtacaggaggagacactaggggttgggaacatctctgatgctcataaactggcagaattaatgcaatggcaatggcaatattacctaaagccatcccatggattcattgtgatctccaccaaaattctaatgatattctttacagaaccaggaaaagcaatgctaaagtacatatggaaacataaaagaccctggacagcagaagcaatcctgagaagagagagatgttctagaaatatcataatacctgatcttaactcacactacagagccacagtgccaaggcagcatggttctgccacatgagcaggcatgcagatcaagggaatagagcagacgactgaaaaaaaccacactgccacaaacacctaatctggggggaaaaaagaatcaaatatattcattgagctaaaagatagcttcttcaacaaatggccctggggaaaacagatcctatcatatggaagaaataaatacatcccatatcacctaccctgaagaaacatcagtcagaaagaaatgatgcgtttaatataaaatgagagactactaggggatgcattagaagactttttgagatacagggataggcaaaaactttctggaaaggaatacagtagcatataaaatgtttaaaaaattgacaatgggaaaatatgaaacaaggagcttctacacagcaaagaaaacagccaccaggatgtaaagacagcctacagaatgacaaggattgcatccgtgtggaactctattaaaaaaaaaaaaaaaaaaaaacttcaaaagttgaaagcttaaataaataaaattctctaaattgtttaatctataataagctaatgaactaaatagctcttaaaagaagaaacacaataacaaatagataaaatgtttaacatccttatcagccaaggatatacatgttaaagctgctctcaggaggactggagagatgaatcattagttaagagcttatactgtgtgaattaagttctcagcacctacatcaggcaacttataacatcctataactctagctccaggggcatccaacaccaagacccccatagatgtgcacatgtgtcacatgtatatacacagacacacacacacactactataaataaagtaaatggctttttaaaactgctttcagactccatctccccctagtcaaaaaactatcatcatgacaaataacaaaaattgataatgatatgaggaaaatgtaactcttatctacaactggtgtagatacaaactgctacaatgtctatggaaagctgaaaatagaactaccacgttacccagctgtattactcttgagtacatatcaaacgcaatttagctcagcattccacaaagagacttgtacaaccattacttcactattcacaagagctacgaaatggaaccagcctggatgttttatcaatacataaagaaaagatagcatgtacccacaaggaagttttattcattccataaaggaaaatgaaatcatgacattttcaggaaagtgcatttgactagaaatcattctattaatagaatgaaataatccagactcagaaagacaaatagtacatatttttttctccattgggagctctgtgagtgtgtgtgtgtgtgtgtgtgtgtgtgtgtgtgtgtgtgtgatgtaagtagacatgaaaccatggaggggaagaaaagatcataaagaggagagggggaaataaaagagggtaatgaaatgcatctgacaggaagcaggaggggtctcctatggggagaacggaaatcaccaggaagaaaatgggccggaagaaggcaatgggagagggaagcatttgagagcaacatgtctatgaaaatgccttaatggaacccattcctttatctgctgcctttaaaagaggataaaacattgtatcgagaactcattaaagaggtaacatgtttatagagggaaagtatcagttaggaacacaattgaaaggcaaggaaaagcttagataataacagtgcggtgaatatttttaaagaggataagaaatggagcaaatactgatgttaactgcttaaaataaaaaaaaaaaattcaaaaagaaaaataaagttcactgtgtaggcctggctggcctaaaactcactacataaatcaagctgttccagagctctgatccaagctcaaaactaaaggctgtgccatcacaaatatgtttgctagcttgaacctcacttgagttatgtgaaccccagtattcaagaagtagccatcttctccctccaatgaacacgggtgtgggctgtttctaaggagaaaaataagggacacatgggtctcccgcaggtcctctgtgtatgctgtggctgttagcttggtgtttttgtaggactcctaacagtggaagcaggtgtgtcttgactcttttgcctgcccttgggactcttctcctcctattgggttgccttgtcctgccttgacattatatcttgttttgtaatgttgggttgtctcttggaggcttgctctttgctgaagaggaaatggaggaggggtaggtgagggaggggaggtagagggagctgggaggagtgaagggaggggaactgtgatcggaatgtattgtacatgagaagaacctctttccaattaaatatgcaaataaataaatagacaaacaggaaaacgagccaaggaaggaaagaaggaaggaaggaaaggaggcccaagctgccgcagaccctttgggcccctttgtctgcgtggaacaggtctctagtcgcaggtgggcaaagtgttggatgaaatgacagacagatgcacacaggagaggttgtgtagaatctgaatgtaatttgtcaaatcgagcatcaaactttttatacagaagaaaatagggaagttgggtgacacaccagcaaggtacaaagaggttactggattcttacacaaaacaggaatgcaaacatagaaggtctgacaggaaccacctgggatagaattcattgttaacaactgggatcaaaaagagctccacctaaggtccacttaatcttagaagccagggtcaagggcttcgggcccttgccatagttcctattttagtctattgtatagtccaccttccccctagccattgtaaatacatgtgtatgggtgtaactcagctatctatagttctaaatatctactctggttcctccttaggtctcaaacttccttcttcctagatgatggtaaattcctgtgtaaggcagtgacttagcttttattcaaagtgatagtgtaataccagaggcaattctgaatgtcactgaataggcaacatttttactgaattccaagcccatggtcagctcaaggactttctgggatattggagcactggcaaaggcttagctatatcagaattcaatcttaaaaggcacttataataagataatactaaaagagagcacatagatccatacaccagaccaacgcgggaatagggtatgagtatatgggttaatgagaacgccaaaactgcaggaggtgagtttccgtgaaactctctgcttcatgagtggctttaaggcttcaggcctgtcaagctgactcgacctgagtgcgtggcaccaagcctctgagccccttgggcagttggtttctgatctgatagaatttggacacattgcttgcacacttctgtgtgtgcagcagcatcctggagagaaagaaactcccgcatgtgcgagcaaagtctcatacttctagcctcggatagttggtcatttaactactgcttgatgtcatgatgaactttctagaaatggtgtgtaggggttttcggagcttttagattattcaggcgtcaaactctgaggctctgctcataaacagaggggtgtcctggtaggatctggataattctctctcgtttttttttacacagggctcccaaggaccagccggagagccaggtattcaggtacgtgactcattaagtttttcaacaaagcaagtttagtcttcttgatcgctggaaattactagaaacctgttcctaagcaatttttaactttttcccctagggtcctcgaggtctgcctggattgccaggaactccagggatgccagggaatgacgtaaggacattttccccaactcccaccccatgtctgtttgaattttctctaacttgcagaggtttgaataagttgcctctgtttctagggagctccagggaaggatggaaagccaggccttccaggccccccaggtgacccggtatgtagacaggccttgcctgatttatgtatctttaatgtacccagaagccaaacagcctaccaagcaaattctgctgtccaagctaattacaatgctcggtgtctgcttggtgattttgtttatccccattattttgtagaggggaaaaaaattcaagctgggtcagcattattgtgtgtgtgtgtgtgtgtgtgtgtgtgtgtgtgtgtgtgtgtgtgtgagatgcatacttatctcctaagggtataattcagctgtacaattttgccccaggctgagccttagcatttaatgtctttgttccatgggaaatagagataaaatagatagccacaatttctgttcttctcaattctggtgagtaaatgaatttcattttctaaatgaaggttttcaggtacgttacctccagtgtggtgtatctccgttgatggagtgcctctgaacagacgagatgattaaattatgaaaattggattgaaaaaaaatcacagaaaacgcattaagatactaaccatgtgttacatagttttatttcaggttaaaccttcctatgagtgacagtaaatccctttaaacagcctcagccatcgcacttaaattttcatatggcacatggcattgtattaagagtcctgtacaataaaatccaaatctgtcctctctctgggttcacagatccccttagcgcccatattgctcctgcctgcggtagctgcaagcagcagtgttatccagcattcccttagggccatcactgaatcctgagtgcctctccacagatcctgttacagtgcttctctctgaaagggcattttaagacctgtagcacaaacacagcccatgtttcccaggtgtctgtcttgtccctctgaagtctcttctgaacttccttaagagctaactttaagacagactcatgggctggtgagatggctcagcaggtaagagcacctgactgctcttccaaaggtcctgagttcaaatcccagcaaccacatggtggctcacaaccatccataacaagatctgactccctcttctggtgtgtctgaagacagctacagtgtacttatatataatcaataaataaatctttaaaaaaaaaaaaaggacagactcaccctgccattcacatatctctcagtagcctgataatgtacctggtaaaggagtgatttccttttaacaaatgggtttgacttttgcacatcactcgaaaccaacagcatagggaaaacatagaggttaccaggtggtgaagctacacaatacagatgtatgagcaaagcatccatggtgagcatgcatgctcttgatgaaggaacagagtgaattctctaatagcctggctccttcagtgctgggtgatatgtcatgatgcatgaagccaagccagtgagtcccacggcgagacgaaaattccatgtcccaatttcaactagcatgtcactttatgaaaaaaaaaatacaccaactaacctagtcccttggagactcacagagactgaactaccaactaaagaacctgcagaggctggacctaggacccctacacatttgtagcagatgtgcaacttggtcttcatgtgggttgagcggggttgtctctgactgttgcctgccattggatccccttcccctacctggaccacatggttgggcctaagtgagtgagcctagtcctgctggaactagatgccccagggtggggtggtacccaaggggagctttcccttctctgaggagaatgggaggtggtaatgggaggggtgatttgcaagggtagaactgggaagaaaggagaagggaaagaaggctgcaattgtgatgcaatgtgaaaaatatgaaacaaaaagtaaagacataacttctatgttcatactgcattgtgttcatgtatatgcaaatatccatgggtttgggtttttttctctcttcttaactacagatcgcacttcctctcttgggagacattggagccctgctgaaggtattcttttgctataaaagaaattacacatttgtgtgcaggaaaggttaaaagggaactttctaccaaagatagaattaatttctcagtccaaaaagattcaaattcaaatgttagaaatatgtaaggcaggaaagcatcatattctatgataaattctagcacttatgtgaatcttcccactctgaaattcagggtctcacattgtggatatggggatgtgggaaggcagtatttcgatgaaagacagaaaggggtaacatcattgatagatacctttaagtagatcttgcctcctctggtttgtttgtttgtttgttttgtttttgtttttgtttcttttttgtttttcgaggcagggtttctctgtatagccctggctgtcctgaaactcactttgtagaccaggctggcctcgaactcagaaatccacctgtctctgcctcccaagtgctggcattaaaggtgtgagccaccacgcctggcccaagatcttgcctcctctgaaacgatagctttctcttcctagatgttcacccacccttgctgtgtgaattgtatgtgccactctgtcagctctggtcacttgcaagatgaaagtctctgaatttaacatgcagattgaatttttatgtcacagaatttcacagaatgagctataaagccaacaattgccctaacatctgttaccctgtaaaacaaaaattatctctactgattatctattctacaaagtgccttgggctaaacatgggggcacctggtagtgggtaaagctatgtacgtgtcgtctctgtgtaatctagtaagagtaggtgaacccaaatgaaaatgtagctgttggtttcactcttacatttcttgtctatgaatgaacagaaagtaatgtatatgcatttataccacttacacagatatttcacttacacaacttgtgttcattcattaaagatttatctgatgacttatatgtaaacacgaagaaatggttatagcattgaatccaccaaaagacatggtctaggggacatactggttggggaattaaagttttcagaaaagatatataaatgtaaatattaatatatgctgactcaaactctgtgtgttgagtctttaacaaggtggtaactactttatgttttctaagatgacttcaggtagagcgctgagaagaattagcataattctaaaaccaaactctccttccctgatcttctaggttaatcagtgtgcggggttccctttgaattagggtgcacatcagccaatgatgggctcatcttaatcatttctatgaaataatattgcatttttttcaagaacttttattaaaaccaatttcacttggttttttgtttgtttgtttgtttggggtttttttttcgtttttttttttttttttttttttttttttttccgagacagggtttctctgtatagctctgactgtcctggaactcactctgtagaccaggctagcctcaaactcagaaatctgcctgcctctgcctcccgagtgctggcattaaaggcatgcgccaccacgccaggccaatttcccttgttttaacactttgccttatctaaccaaagaaaatgagactaataccaaacgaatctaagaagtttctgttgagttataacaattaccatcttttcaaattctactaaagtcatcagtgcaatcctctatctgaggatgtttctgaaatcagtgtcctaaggctttgctctattttgctcatgtgtgtgtgtgtgtgtatacagtcataattcatcttttttaaacatcttgaaatgtggaaactctcctgattctattgagttccactttccccattgctgcatggtggatctacaactttatgtgtgttttttaattcttctatcaacttgacaatcccatggaatgatacaggtggtaaaattgtttgatcaactatacacttgattctggtatcagtttacatatttgaaccctagagagaattattccagagtggaatctaccatttctgaggccaagatccttcttaatatcacatatatttgtgttccaaggaatatatttctgggaaccagatatttattgggccaaaagtattggtatgaatggctttagtttttcttgccaattttttttatcaatggcaaatctccgcccctttttctgttcaatgattctccccatgaatgaaaatcacgagcatttttttgtcctaccctgacagctgagccctccatcagtggctcctagtcttagccctgatcatatttttatccaccattttgttttaaataagcttctcacagacatttttccctagccacgtgataagactttggtttatttttgaagcaaagacacttagactcagcctctgtagatcacctgagggttgtggtgacgtcagtggaatgctgatttcactacttgggttattagtttgatatgctacttaatcttgctgcttaatccaaactttaatatggcttcccttcctcaacatgctaaaaaaaagttaaaactcgtattgcgttctcaaattacatttcccacccccattatttattgggagttttcctttgaaatggcatcagagatgtatgtgaggtgttttcatttttaagtacgcgttcaccaatattataaaccaagattaatgattagggttgtcagaatttttaaccttacaaaaagtcatcttccgaattggacacacaggtctctgaaagcagaatggcctcacaatcactcattgacaaggttcaaacggatcagacctcggtttcttaaatgggttttaggaacctctcagtatgttgtctttatactcgctagaacttctgtggcaactgtcaagccaatgtccctgggctgaaaagcatcaaaggcgatgacggaagcactggggagcctggaaagtatgatcctgcagccaggaaggtgagcgctttgttgcatgtttgcagcctactgagctcctgaggagtcctacctcagagctctgatacctctctgtctccagggtgatgtagggccacgaggtcctccgggattcccaggcagagaagggccaaaggtaagaaagtcttccgagagatttgtcaaactctctaaaaagtagaacttacattggcaatgttgggcaggctgccattcctttctaccctgatcctatccaaatgacggaccccgggggttctgatgggaggaggggttactttctttcccctattgttccaaaagacactgaaatggtccagtattagctgaagttgctgtctttttagggaagcaaaggagagcggggctaccctggaatacacggggagaaaggcgatgaggtaagcgattctgctgttgcttctctctcctgatcaaacagaggaaagatgttgaggcgattattattctgagggtatgtgccaaccatttgttgccttcaaatatcccaactaaatgccacagagactcttagatttataataagccgtaaagccccacagctgggcagacatcagacctctctgctattttgtttgcttccttgtcaaaaatattacttgtcataaatttcgtttgagcacttcctactccatcatggcgaccctcatggccatgagctcccaaaccacaatgacccacaacaccctatggagacttccttccttctttttctctccctcgtggtccctgcctgagaccccaggcccgggaatgaagctccacctacctctcttccacccagccacaggctgtaggcatccttattaaccaatcaggaatgacttgagggacaaagtttacaaaacaaaagctagaataagtgaagattcactcattgggggtaaccaggtcttgggagccgatttttagcatctggatgcacagcagcaccagactaactctaacaaaaagaaacggggttcgccataatgtatgtttaatcccaaaaccatgagtatgtatttgatttaaaatagcacattttagtaattgtcgatactcatttctctatggtggtacaaatatggagacacagcgtcaaggctaaaaattactatgaaagttatggggtttcaggtctcaggtaattatcccaaccctcgcaggatagaaagaggaagagtgtaatcacagaaagaaagctcagggtagctaagagagggagagagcatatgaacatgtgtaaggatgagggcagcttcagagcccagctaagagctggggacacctctctaccatgattcaactttaacaaccttggtttctctaagtcactgctcagcttccaaatgcctgggagaaataagctaagctaaggatcttgatagaccggtttaggccagccactcacccccagcaccgagcatccaacgcagatgtggttttgagataacggtgtaattttctgacagtaagccacagtgatgctcaggacattattcttgccctgcataactcacattaactcttagaaaaaccaattagaatgatgaattgttgttggtttaaacagttttggtgctaatagttcttaatgaaagtaagaaagccatctggcatatattaaccttgatggtagtatgggaaattatgacactgtaaaatagatctattttcctggttggaactatatttcccattacaagctatcatcatttattattggttttattgatattcattgtgttctggaaacctttaagattggctcgggattgttttccaagttaaaaaaattaaagaatgagaagtacggcatttattttcatttataaataaaacattgaaggcatttgttttgaaaacaagtaagaattaatgagcttttgcttcctcaagttccacagaagatttctgtaaaatataaacacagcaatgggttttaacaggcaggcaggttttaactgcctagattcaagaggtgggcttaagaggcaattgagagggtaataaaaaacaagggaattgagaaataattggaattggagctttttatgagtgactctgttgaattcacgagaagttaatttttattgattctgtgaggtattttgccatcttggtgagctgaacccattgttaatatccctcagtattttagtgtgttctttcttagacacactttgtgcactctttgacatggatcacacgaaattctgcagaggactcactagagtgcaggaggccctcttctcttgtcctctatataccaagcgtaacgtggatgaaccaggcccaatacagcttttgtctctcgcacagatcagtaacagcaagtgattgcatcatctacttccactcaaagaataccatggttacgtacttggctggtttgtctgagtgaataaaatgttagccaacaatatataccttttcaactggccaacagactacattctgataacagacatgcattgtctctaatgttacaaagccacaggtgtctattcttcattgaacgaaaaaggtacagagggaagctcacacctttcggagatctaattttagaaacaacagtttaattcactaagctagaggaatcaggcatttgtcaatgttttgaaaagtgacttactctgggttcttcatgttgctgtataactcaacatcaaattgcaaagtgttagcagagcacagatcctacattttctagccagagaaaaaaatttgactatatgtctttatataatattttatgataataaatgacaaagaaggcatgaaaatgtcgttattcataaagcataacaatgatggctgaatgcctacgcaatagattttaatttgagttttgagtttgatactatgtgctaaacttgtccatcttgctcttgagtgtcatcatccttcaatagccattgggacttacaaaatcttcataccaccccttatgcctctgcggcagctttcactcttgtgacagaatttcgagcacctgagagaaagactgctgagaaagatgggttttacctgtgtagcagggtttattttcaagattaatgctgtcatcagcacttaatgactcccatgtttataaattagacaacctgaaaactcactcaaagttgagacttaaagtagggaagagagaaagatatctacgtaagtatatctgaaacagatatatgtataaaagttatggaaatgtggattttttttaagataagaaaatttctcatacatgtgtataagcttcagtcattaaaaagcaccattcccagtggaaaattgtcctttccatttacaaaattataaatctgtttataaactcgcacaagtgataataaggaaatgaaaagaggtagttcaccaaactgatacatgcacatgtgtacatatgtgcacacagcaagccaaaggggttgatacattcttgaagataaaatgaatatgttcttcaatacaaatatacataagatttttttcctgatacttatttcatgaggcattccagcacattcaaggagatcttttaagtatttcttcatatcatacctgtcttagttacttttcttttgctacaaagagataccatgaccaatgcaatatacatatatatatatatatatgcatatatatgtgtgtgtgtgtatatatgtatatatacatatatgtgtgtgtgtatatatatacatatatgtatatttagatatatagatatatatttgaagacttttatactgtttccaagttcatatgggaagcatagcagcaggcaggtaggcaggcaaggtgctggagaggagctgggatcttacatccatccacaagcatgacacacacacagagtgggggagtctggacctgaaggagtctggcttttgataccacaaagcccaaccccagtgacacacctcctccaacaaggccaaacctcctaatccttccaaaacagttccattacctaccaactaggaatcaagcattcaaatatatgagctgattaaaactattcacattcaaactaccacagtatctcatgaataaacctgaagcaatatgtggtctcaggtgttggataaactgaacttattcttaagcctattggtacaaagaacctcgatccagctcaatcctgttgatacctcgtaaatacagatgcagtcattttaccacagtcactttgcccgacatttataatggacataaaaaaaccatcatttaaggacaatagaaagaggatttctaatatagcaaataatatctgagcagtataaaatattttaatcagtagagaaactgactcttgaaagaatggcaccatccaatccagaacttgggtcttgttttcttcgtatgtttttgcttatttgtttggtcggcatttatactgatggaggttgaagcctaagcttaatgaccattaggcaagtattgtaccactgagctacagccccagcccttccttctagagcttcatgcatttcctatgactctgaagtaacaaacaggtgaataatatttttctctaattaaaatgtgatctaagcctctcatagaaaaagtggtaaaaaacctaaaatttatgtctgtccccacaacacaccaagtaataatgtgtgttgtatatggtgtatggtcatagtggtattatagatggcccacaatccgaacaccagacagcctctgaaagtgctggaaatctcctaacaccaacatgcaacaattccgtttttttcccagggtcttcaaggaatccctggcctctcgggagctcctggcccaactggaccccctgtaagtatttgctaagactgcattcctcataggccatacctataggctgatacatggtacattaatattcctggtgcctttcctgctctgtatctctgtatagcccagccattgccaagtaaagtagccccttacagcactccaactttcaaataagattatttaagcctgctcagtgtcctggagacttctcttcagaatttttgccaagccaaagagctgcttctcgctctgctggaggtagagtcctcaagtacactctctccttggttataaatttttggcactaaccttagaagagatattcagatgccacacaagctgagaattttctaaaggaaaatagcaggccaaagattatcagctttaatttgttgtattcctgtatgtgaatttttttaaattctgttttgccaccccctgaacacagcagtatggcctttgggttatcttgtttttctggaacagaatcttctttcatttccaacctgacaaacccaatctcttatttagagtttaattctaagcaatcccaaggttcagttgccagataaaagatggggcacacaatcacacttgagtttcagaccaacaaataatgtttgtttaagtttgtcccaaataatgcattttcctttagaaaccaactccactaaagtcaatgtctcaacttccctgtctcttctcttaaagtccctatgccagtaaattatttttatctctcaaataagaagtgatcattcgattaatattttgaggcataggtttggtgtaactaaaagtttatcatttatgtttgtatctatatagtaaaacttaaaattatgaaagagaactgtaaaagaaaccacaagaattactattaattctactctcaaaggagaattaagattaacttttgttttcctttctacaatgcagatcacataactcagtatgcacatttttcattctgcccagtattggagtatttaagatgttgatcactaccaaaattatacctcatttagaaagacgtgttatgtaaattggcatttaaacaggaaggctaaattcttaagtgtatcaaaaggtttcaattaaggtcattaaatgtggttagccaaggtgaaaaaaaaaaaaaaaaaacacagagatagaaaatttaaccttctaagggcttatcaggaaaatacaggctgctgtatcagcctgaagaaatataagctggtagaaccaatttaattagggtcaaatgaccttcgaaatgggtaggtttaagcggtcaccttccaccacctattgaccattggcttgttggttccataacaacaagcttttcattttttacagggcttaacaggaagaactggacatcctggtcccactggagcaaaaggtgacaaggtacaaaggaaaatggggcttgggttaggggtaaggtgggaccattgactgtgagctccattcaatcaagggcagcctacaagagcaaatgacgtatgctgggcagaggctactcgtggagtggacttgcaaagatgttggtctaaaagtgggtccaaacacaggtgttcatagatgagaactctgggtttggagatagaaaatccaaacggtttagaagctgagacatccgtttgtgaggaagggtgactggttcaagcctcctaaagaggtaaaggtaagctggattgtaatgtattagagacttccagctatggctgtcttgttctctttggacttttgttatatatatatataaagctagaaaatcccccaccaaagcactggtggttttggtagctggcgggcccattttcttattcacagagggcatgttctaaaggagtctttgtgtggttcaacagtaacgaagctctttcaggcttctttataagggcactgatcccattcatgaaagttccaccccatgacctatctcctaaagggcccatctacttcgtcgtcctatgagtaggattcatgctgtaagtttagaagaggaaagcccaaacattccaagcaagctccctggctccagatgatgtcttgctggctatcaagacaacgatcagtaaccaaggacttgtgagacagtctggtaatgctgtccctaaaagaccttggcaggaaatgactaaagccatgttcccttggaagaagaatgtattagttactatagttgctatgtcaaaatatctgagaaaaccgacaaaggtggggagggtttatttgcacttacagttcaagacctcagttcatcgtggtggggaggtcatggtagaagaaagatcttgaggtcttcagttcacgtctaccgcatcagaaggcaggaagcagagataactagttgaatacaactgttctactcccttattcagttgggcctccagcctgtgtgctaatgatgcccctattcagggtgggtcctcctactaaacttttctggaaacacccacccagaggtgtgttgccatggtgattctaaatctcatccaaccgacagtgaggaccaaccatcacagctcacagctgggtgtgtgtgctgtggctgggagagaaaaccaacagcatgggagcatcaagctgtcatggtgtaagatctcacttccaggcattacagtgaccgtccaggcatagccaccgaatggatgaagtagctacagctattcagattaaggaaataagtgcaaagaactacagaagctgcttaagtgtctcctgcacgcacgcttgccaggatgccacatcctgagcagagggaagcgtgatggaatcaagatccccgaggcactgagaggaagcagtgtgctagagagcctcagcacatttttatcctgttaagatcttaaggatctctctgtcccagcccctttcctctattttctatgaaaattattcagcccttgatttgcctttgaagctaatgggaattccacactgaaatgagcatgagggcacaaatgagaatattccttctgatggtgccagggggtggggaggagtgttctcgacaggcacatattgtttgttgactcatgagaagtgtgatgtaatgctctgaagggcattggcagaggtcaacagaacagggggagtcttagggggacggcaaccatcaaagctgtgtgggaaagatacagcacacttcctcagcgtgcgtgcacgtgctcgggcagtgcatcgcgtgagaaactttactgtttatgtacaatgataaatatatggtttgtgatgtgttcctttgttggtaggaaacagatgagtattgaaataagatcttcagtccagttctgaaagaggactgacatccctcaaaattcctgggcatcatatgctctgtgttgtcaccatccctgatagatgtgacttagaacagttttataatgataccattctaaaagcagtgcgcagttataggaacgactcttaaaaagccaaaagagctgcagcaactgcttcccatgaatggactggtcagtatttctgtgctttgtaaaagtcacttaccaggtttcagttcaaaaaaactcacagaatagttattggcccagtaaacaattattggagtcccacttgcctttagatttatgtctcctacaagctatttacactgtacaaaccatttcccttaaatagtgtcatagcaaaatcatcacttccactcagtcaaacacacctcacctggttcgatatgacactggttgggacttcatacttcagttgcatattccattatgaacttgagggagtgaagatgaagccaaaagtaaagattaatccagagagccacagtctccaagtccacaatttattcacatgaactctaccctatcccccacgctcacataggaggaaaaatcccccacctgtactcaaagcccagggcaggtcacctaactggtctacccccagtgaaactgtcactcctagagttcgcacagcgagaatccaggtggacttgaaaggggttattcactttcctggagtggggaaatgtattttactgggttaagaagcaagctaagcagaataggatcgcaaggctgaagccaaatgacaagccatgatgatttcggaagattgctttctgaacaacctggttcacagacttggagtagaaatggccaaaccattaattcaagcctgtgtctctcttgcagggtagtgagggaccccctgggaaacctggacctcctggaccccctgtgagttgtttgaggttttaattctgtgtacttatgactcatacgtaggttacctagatgcttgcaaaacaaaatattcagttgagtgtgtgcttttgtgactgcttgtgtgtgagcatgtgtgcctgtatacatgcctgtgcgtgtatgtgtgtgtgtgtgtgtgtgtgtatacgtgtgtaaatgacatgcaatgcagcattaggtgggcctaacccgtctctatttcagctcagctgcagtctgcagtgtttagagttgtttgtatagtgtgaacttcttttccatggaatccggacgcctgactctctacttccatcaacggatggagaaacatttgactacacagatgataaagctccacagatattaaaaggcctttaagaagacatctttccaaccacgcaatttgctttttcaaagatgttgtttatgttcaccccataagcagtgtctgagacgggaagacattctacttccagggcacgcagtgagaaaaatgccccagggctctggaggtcttctgccctagtcagccacacagacttccagggaggctgtgcagagcagcgcggcctctctctgtagcaagtctgccctcttgtggagccatgttcgaatagcagcagagctggggctcacacgtgttatttcctgcattacctcgtaggaacttaaaaatccaaacttagcagagaaagggtgaagtctcacagtagctttctgaaaactaaagagtatgttatgagtctgggtatagttgcatgctttacacacaaattaactgcgttggcctccgctttcttaaacacattctgcatcggattcttccttcacatagaagcaagccagacaactcacagagttcagattctaaaaatgtcatctcctcaatgggggtaaaaagcaaaatatatcatgagaccgttaaagaaacctgtgcttttctataaggcttaagaaatctgcctcttgtctctagatttttttttttaagccagattatacatcttctcttggaaaacattcttacatctattcgaggccaagtatactgaaatatagcccatgttcagttattgccaaaagagtgaagaatcaataaaaggataaacagacagagcatcctcttctgtcaccactgatttgaagatgcgtggaaacagtgctcgctgggcacggctacctctactgttatcctcaagcagtaatgaaataaagacttcctcatttttacagctgaggtatagaaaaaataacaaaaaaaaaatgaaaacacacttggattttttttcttagagtctgttatcctttctaggtgtttccaaactgaatgtttcgtgtgcatttttgcaaacatggacgagagttttcaagctacacaatgagtgcagtttcatgctctatatttatgcatcaaagttttagttttgttgttttgtttgtttgtttgtttgttttgagcaagttcttgttccctggttattaaagacatcttggtagaagcatccacacagggtgttatgagtgacgttatcctcccattcaccttaagtttctgtctggcttgaagagactgtgaggaaacgtcactttgcagttggcaagctgttccctagtcacagctacatcagtccgacggcatggctgcctgcaggtcagcaggctgagaacacagtaaattggctattcagacactgaattttaatgagcagatagtattttttcaaccaattgcattagaacctcatgtgccacacctgaacacgactcacactccaaccggaagcatccaagtgttccagacataagtcaggctcctttgtccagttttccccactgttttaaaatattgaaacactgtggtatttggtttatggtattaaattcaccttaaatatagagtagggggaaatttaagtaaaagttaatatagaaagaataccatctgataaaatgaccaaagttccaagtgctaacttctgtgtctcatttttttcctaagggtgtcccgctcaatgagggaaacggcatgagcagtttatataaaatccaggtacctccatgtctaattacctatgatgtatagatctataatctataaattcttctcatctgctttctcttcccttgaagggaggggtgaatgttcccggttacccaggacctccgggccccccagtaagtacagatgttctgtctttaagttgccttagcttgatcacaataatgatgggagatgggtctgccttgagcttgctggaaactggatgtcacaaatatcacccagttttacagaggagtaaagaagtacaactaatttaaataaaagaaacagtgagcaaagccttaattgtggaaaatatttagcatagcattgtctctttccttatagttaatctaagctctagatcaatgtccaaatgtgtccatagaaatagcaccatgttgtttctctaaacttattttattttaatgatataaggtggatgggggctgggggagggggttatatgcatgcaatatgcatgcaattcctgtacgagccagaagagggtgctagatttcctggagctagaattacaggtgtaagccacacatcatgggtgctagaacctgcactcaggtcctctggaagaacattatgtgctcctaactactggaacatcgctagacctcaaattatgtttctaaactttactctaaatctaaccttcagcaaagtcagaatacgtacctttcttatatttgttaacaagaatttgaagaaagtgctccgggttctacaatggtggcttagtcgtaattaaactacctttccacacctttcttccagggtccaaaaggtgatcctggcccagtggtacgtatgttcctacttccgtgaagtctttgttaacactagaaaaggcaccaggcaaagacaggctgtcatcttgggtgtgtatcagtgaaggtgtcagacaagcaagcaaatgaagaaatgtcagcaaaatgtgttctttattttcacgatgctttagtccccattctgtgcctgcccttgaggctctgctgtttcctttagtgggttttaaaaatcgtcctctgatgtaggaagacacatagaatgcccttgataaatagaacactttcctctgaccgccttctttggatgattgatgcaatttaaagtcacttgtggaagagaaacacttaagggagagaaatcccttactatgtctgacatctcaccaaccagaaaaggggagagggttgtttatttactttgcaagtcttgggcaattattctgcagggagcgtagactgtcatagcccttcatattgagtggaagacagcaggaggttaacactcagcaaggaaggagatcatgtcctccagctgccccaaggatgataactgttctcagcatctctctcaacggtggagcatccctgcaaaagctctgccagattcaattagattccctctaaccttctgcacttcttttcctgccatgtcctttccaagcaaatattccatcgttcaggtcctatttatatatccgttcaacctttgagggaagaagtgaaaattaatgtacctagtactgagataaactccccaaccaccttctgatgctatgtgggaaaaaaatgagtcattttactataatggtagaagttggtaaaactgtctgaaagaaaaagcattaaaccagaagagagaaaccatggaaagtgactttttcaaaagagagttatcaaggaagttatcattgttactggtcagtatatattagatgtctatctgatttgctctaaaataagtatttcaagtccttcatactatattctgaatcccaaatgtgttatatggaagttaccatttctttgtttgcaacatttaaaatactattatatatggtcatctagaaatatgttgttcatttttatttctatttctcatcatattgataaaaatctccccctagtcttactgtcctacagacttttaaaataggaccgcctctgagtcacagagagaaatttagacttctcattgacttttctgggatactctttaagttctaatgttaataattggcagattagggtaagaaaaaaattaaatgttatactaaagagtacattataatttattagcactggaaagaagctggccaaaatataaagactgtttgagtaaaatttgaagaaattaggtcccatatttcttagctgtgacagaacaaataataaaaaaaaaaaaaacaactgaagaatagtctctgtttagactgtgagcttgtgtgaatgaaacacaaaaacagagatagaacgctgtggggttgaatattgtgtgaacatccacacttaccatacaaacaaaattccctgaaattactcccctgagtcctatctgcctgtgcacagccacccgccatactcattgtcacacatcatctgctgggtctggagaaaccacactccacggcacaggaataagccaggagtgagagaactactgaccgagtacgcattttaaaagggaacacggatgaggtgggtaggggaatgtcctttctgggtgtccttcaagttccatgacaagctcaagtcagcttcgtgtcactgtgacaaagcacagaaggaggaaacgttgttttgactgacgtttcagaccattgtccgccctgtggtgagtcagaatatgtaccagggaacacttagggaggctgagctgctagtctcacggtgacacaaagcaaaagacctctttcctttataaccaaaccctgtccctacagcccattaagctataagtctataatgggctaattgatatggtcacagccttcatgaccccctcttctgtgtgcagccacattgcagatcagcccttaaattcatgcactttgaggggggtctttaagattcaacacacaacacgtggcaataataatcttctgaataagcctttatagaggaaaaaattaccttaaattgaatctgcgaataactagatggtttcctgatgcaaaccacttttttttctttagctattcaatgtctaaatgatttcaattaatatttaattactatgtacgctcaaacaaatgctgattaattaattgattgcttcttctatcctaaggaaagactgttgagagggtaaacaaagaaacatgatactaggaaatattccatgcatcaataactaggagcccccttcatactgattcacacagaatacaatctgaacacgttttatcatttattcttatgactggcaggttatatatacatatatagtagtgagaattgttttgaattatgaaacataaacataccaagttgtatgcccacttgtttagtagtgtgtagtaggcaataagcaataatgggtgtacagatttagaagtctttcagatgtgtattttctgtacaaaaatacatctacagagaatataatggaaacgcttgctattctgtgttacattgctttttatttgtttgttttgagacaatatctcactgtgaagctctggctggctggctagttggctggggaactccccttatagatcaggctagcctggaactcaccctgatctgagctctacctgccttagcttctgcttcccaggtgctaggattaaaagcctgcaccaccacacccagccagtgttgttaagtttaaaatatccactgtcctaagaaaatgttaacagttaacagtaatttataaggatttatcagataactctcactttacctatttctctatttttctaaagatttttttttgtttttctgtgctttgcttgcatatatagccatgcacaacatgcatgcagtacccacaagaggccagtggagggcattgtatccctgggactggagttacaggtggttgtgagctaccttgtgggtgctgggaactgaaccaaggtcttctgcaagagcaaccaatgctcttaactgctgagcctctctctgaaccaactctacatccttcttgatcacaaggtttatttgttcaaataatcagcatctttcaacatagattttccaaatatcttacttaaagacatatagtttgggacagtgcagtagaatatatataaagggcaaatgtttgttttgtttcatttcagtgctgtgtatcccctcctagcgcccgtcagcttgagcaatgacttagaatggctggaggtgcctctcctgggtgatcttcctaagcatttacagtcgtgttaaggatgctacaagttctgctttgagtgctccagtttcattcgctcataaagagttcaatcttattatatcataagctagtagccccaggtgcctcacaaaatggcaaactttattaaaatctgctcttcattttaactcttgctaaaattggagttattaatatactagagggattcgtcctgattagattcttaatcagaataaaaacaattaatcagaaaatggactcatgcctggagaatagctttaattcccaaactgttttcatatacctaatttgaaaaaaacaggataccgtccacttgccaagtttcaaatcagaattgaggagcataggacataaagacgctgactttaaaccattgcttacaaacctctggtccttattcctctttatagggagagcctggtgcaatgggcttgccaggactagaaggatttcctggtgtaaaggtaagcacagaagttaaaaatgcattcattcatcttcagaaatgtatatgtacctcctatcatgccaataactgtttcatgaaacataaaatgaatgtataaggaaatgaaacaaatgaatcttttatacttataggactcattttctagggcaggatactgggactagttgtatatgcaagatagaaacaatgatatcacaaagaaattaaagtagaatgggccaggtccagagagatggctcagtggttaagagcactgtctacctttcagaagacccaggttcaattcccagcacctatacagcagctcccaactatctgtaattccaggcaattcacaatcctcaccaaaaacatataaaaactgatacacattaaataaatgaattagtcctttttaaaagaggattaaagggctgcatgcatgcttggggtgggagcccccatggttatcatatgatatccgagaaagtaagagctgtccagtggcttaaaggaggtgagttagccacgtggagcagaaacaacagatgttaagatcttgagacaggccacctcctccaggcataataagaaggtgagtgtgtggatgcagaaatcttggctatgaggtccgagaagtcttagaacggtaccctcatcacatggaggagtgctgctcagtgtggccactggaagaactgtgctgtctgtatccttagctacaaggaacacgagagatcgagataagctcccaagttatatagtcttctagtttgctttctgtggctgtgataaaacactctcaccagaagcaaattgggagaacaaaagggcttgtttggcttgtgcttccgtttatcacactccaccatcaagcaaagtcatggcaggagcccaagcaggaacctggaggcagacaccgaagcagccatgaaagagtactggctactgacttgctttccttaactcactcagctgaactcttaagactgcctaggaccacctgtccagtggaggcatcactcacagtgggatgggccctcccacagccatcattaactaagaaaatgcccagcagacatgcctagtgagccattccccagctgggacttcctcttcccgggtgactttagaatgtcttaacttgtcataaactaacgagaacatctagtaattttggtaaaagttgtctcagagatgtgggattggtgcatttatcttggttcatggtatattaaaaaattagtaagctcgtgcttcaaagcaggaacctaaataagcatgaacaaagagggttatctgccagtgtagactttaatctttgaccctaagcaaaacccagagccattgataagaacagcacagccacctgagttggaaggaaacaaagacagctagaaggtggtgtttgtcagctttgtaacaaatgcctataaagagaagactgagccaggtgttgtggcacacacctgtaatcccagcactcgggagacagaggcaggcagaaagcaaagattgagagacaagagagggtggtggtcgcagatcaccccttcaatggcatgactttgtcctgtgaggcttcatagactaaagattacaccatcttccaatggcaccacagactggtgaataagtcttcaacacatgggcctttgaggaactagagcacaggccattccagcatccaggtggaagctgatgttggctggctcagggtagatatggtgggtagaggaagaaatgactagattatagacactgtttgaggaaagaataaacagggttttctgattgattggataaaggtaaggaatagagttgtcaaggaagactctaagttttgtgactaagcaactagcatgatgggtagtcaggaagtgaaagaaggaagtatgaagaagtcacagtcactaagcatagtcagatcagtccccacaattacttacatttctgcagccaagagcggactttcaagtaaagatagagaacagtagatgagtgggtttaaacgatgccctagctttgataagcgagcacttaagcccagatatatgaagagaagattaatggtaacaacagggagatatgaaagcaagtgactgcagaattttaactgggcataaaagaatcagaccatggaagggagtggaggataatgaaaactttgaaccataaatgaatcgagggccttggcatgctggtggccaaaagctgaaatgttcaagaatgagatgctgggagccatgtacacattgactgtactcacacaggaggcaagatgattagggaaacgagatccaagggtgtgaggagtctcaaaagtggaggctttcggaacactagcatttatcatatcaccaatttccactggatgaaacattacagtatagtcacgataaaaacaaatgagaattacacacgtatatccttttcctggatgttttttcctttacattttagttgacccatgaagttcctatatgtgtatatagtagattgcagtcatatcagggctgctgtgatatcaacacttccaacattgggtatttctttgggacaagcataatggaaatccgttcctctaagttctgtgaaataaatggcatgttatcaccatggcaatcctactgtgaaacaacacagtggctcacagccatcagtaatgcgatctaatgtcctcttctggcaggcagatgtacgtgcagatagagtactcatatgttaaataataaataataaataaattcatctttattttttaaatgcctttgtattatcccatgtgtaatcaccagcatacgagacattgtcagctgtacctgaaacatcacactgcctcttgaagagcacccaacacattctgtttctcagagcaattaaaagggttttctatcaggtcagcagaggagagccacagatcttcaatcctcagtctttctcttctaacccttgcatccactggggtgaggttaagaaggggtttctagaaaacattcagtacgattaatctctcaggtcacggtaatgatgttttttatgggtagaattttaagtattaactagctttagctgtaagaatgtatggtttgctcttaaaataagacagaggaacatcatgaatgatgctcttcattggggttatgaatcactttgctatgtagagggagaaaacgcaataggttgacttgtgccttcattgttttctgctctgctggctttctccatacacgctaatatcagtagcacttatcatagccaagcaaagcgttacaaatccaatttctttgaatgatatacctttgtatcatttctaccccttctcctctccctccaactccactaccagccccacaccctctcaaattcacaacatcttcttcactattacacacacataaataaacagcaggtatatgaagacgacctattgaggacatttagttttgtgtgtgtgtgtgtgtgtgtgtgtgtgtgtgtgtgtgtgtgtgtgtgtttaggcctggctgtaactcttgatctaggtaagggtaaggctttgagattttttttcctccatacacaacagatgtcaaattactctttgagcaatgattctaaaagcgaagagtccatagacatcattgtaagtagacatttctatctttatcccaacagggagatcgaggcccagcaggccccccaggcatagccggcatatcggtgagttgggtttatctcatcttagcttcttacacattttctgtgcccatacccagactgtagctactggtcaaggaagcttggagtatactgtgactctgggggcagccactgcccagagcttgtccctctctcgaccctggtgtgtcttttcttaattttgatctttcttctgtttttccttcccaagtttcttagtaaatccatggctgtgtgttagtgtgtgtgcacagctctgaaaactcacttgttgtatctctgtccctgtcatatttcacagttctccatcttccaagggccaagtgcttatcctggggcacacacattaggctccctcctgcacacagctctagtctgcccggtgtttgcctcacccagggttattagcagagctttattgccgctaatgttccctcataaaccaggcctctgtcctctccatcatttttgttgctctctggtgtcaaatgcttttatctcatcaaggtcttcacaaatgaataggaagtgctcccagaaaggttgaagtcatttctatgagcccttgggatacttctgatcttcattcatgataccctcattaaaattttgtggtcacggtttatgaataagaggcccatttatctcttgccaggtgaccctgcggggaaagtccagttatcccattgcaagaaagtcagtggagaccatatgctcgggtagaaagagcattgtgaatacagaaagcaccttagtcttagccccaccccactgcagctacgtgacccccacaccacctcaaaactccggccaccatccctaaagaggctcacactccctccccattactacactgagctagctcaaataaacaataaaatgctgccagtcatgtacatgtcttacagagaatgactttttttattaaatttgtctagactgagaccaggtatgtgtataactgtaaaggaaaaaaaacaaaaaaaaacaaaagataaaagaaaaaaaaaagaaagaaaactaccttctctctcaggcactcttgaatttttgtaaaatgaggatccttcttgaaaacgggcttcacactgaatctcagaccctggacccacccctgccactcttcctcatagtgtggggctctctttctggaactgtactcagaatgccattccaaactgctcacttacactcacaaagaaattcatcttcccactgcattcatctacacaggacttcaagaaacgttccgctatgaccataaattaagtctgtcttcaaagaatgatcactgggtaccagcaaagacatcaagacatgtatagtaatttcaaaagatagttcttttgagcaattccagaagtatttttggaggctgtaagttggctgaaatatcaagacattacatttggatacctaacatctgataaatgtactttaaaataggatttcacaactcccaggagcacttggcaactccagaattaggaaagggtttaaacatggacctagcacacgtgtgcagttgtgtgatttaaagtgtctgttttttacctggtccttggaaaacaaaacagttaagaggccctacaagtagtgataatggctacaaaacagaggacagttaaatttcatcattgatacgtagagatagtgagatatatttcagtactgtctaaatctatcgaaatgataattgtagttgaagcaaagataaaatcagttggacatgtcatgcctactcagtggaggtgcacagaacccactcctgccctttctagaacagtctgcctctttccagtgtagatgaggctacccagggctttccctagaatttctctctttcttccttctctgagggggatagcctcccagaattctaaagcaggttgaagagggggcctagccctttaaagtctctgatactcacccatatacccacactgagtttcccagacatgattaggcctacggagtaggaggctctcttccagcagcaacgctgccagcttcattttccagtctctgctaggccactatgctagctgccttctgtgacaaaatatttgacagaagccacttgagagccatcagacatggcagctgaggtaggccgggcaggggcggaaagagcctacagtgttgcttcttcaaatgttggtagatcaaaccttagagcactcaggcaggacccagaagtagatacaaccttcaggaatgacctctgagaagcctaattgtttctctgctggtaaaaccacagcctgaaggttttcaatctccccaaactccaaactgccaccagctgaagaccatgtgttcaaacacataggcctatgagataaactccatgttcctatctctgctctagtgtctcctgactctcagttctttggacaaggcacactgacaggtttttaaaaaataattattttcctcaaccttttacccaagcacagcttttcaaatagaatgtgcttttcttttcttccgattatcttattaccaacatagaagctctcctgtgaaactccaaacctgatagaatttctctcactctgccttctttgtcctagtttgctctctattgacgtagttaaaaaccattaccaagagcaacttgagaaggaaagagtttgtttgaaaggcttatgtgccctgatcacagtccttccctcaggcaaatcaggccggaaacctggagcagagaacgaggtttgctcaccctgcttttttaaacaacccaggaccaccaggtttacccctaccagtgcccaggggtagcaccacccacagtgggctgggcgcacccatgtcaatcattaattaaggaaaccttccacagacttgccctgggccaatcttacggaggaattgcgaggatcaaggttttttttcttattaaaagactccagttcatgtcaacttgatgaaaactcaccagcacaccccatctccgccccatccccaccccaaaccaccccctagagtaaggaagagctaccaggcaaaaagacatagagatttctaatagtgaggatacattgtcttcctgtgttcgaaagcatccctggctccccctcggcattctcaagtgtgtactttgcagcccctagatcgtgtcctggtccgattactgtatatactagccctataaactccaggaagtgtgtggaatcagtagcgtggttcttaacatttttatttgattttgtcacagggaaaaccaggtgccccaggccctccaggagtaccaggggagcaggtaagctaccttttacaatggataaactgctgtcatacccaggtgctttttaaagacatttttaccaatgtttttccccctttgggacacgtttgtagggtgaaagaggacctattggagatacaggttttcctggaccagagggaccctcggggaagccagtaagtacttgtttaccttctagaaactgctgtctaaaagctgttctaagcgttgctgcaggagccgtggatgtggggaaaagaagggagtgggagagaactctagtcctgccagagttccagtgctctgggcggattccacacggccccgggtgggtgtctggctgttaaagccactgaccccactcagcgggtggtggacaagtggcagccctaggtaccagcttcttagtcttgggcatcccatgctggaaaccgcaaaagagctgagaacagaatggggccctggggcaacactgggcccccagggctgaagggaggagagagttgggggagagggggcactggatggttccaacacgggcaagagtccttggtcaggtctatggctggagcacaggatggccttctggcgggaggttagataaggcttgttaggagaaagcccatcccatcgttcaccacaggccttgatgatcagagacagtctatggttttagagctttattgtagaaaggcagggagaaagagagaagggagaaagagagagagagaccagtcataaccacgtggagagaggggggaagaaagagagggaaggagggctagagatgagagtaagaaaggtgagagcttaaaagagagcaaggaggggccaagcagcccctcttatagtggtctgagctatcttgctgttgccaggtaactgtggggaggagcatacctggctatagtcaggtaactgtggcggtggagaatgccagaagcttgggacattgtgtgactgatagtcacaggattatagacaggcatctgactctgggaatgtggctcgcctttctgtcccttgtagggctctccactgggtcaccagaacaagccccattcaaccaaaataggctgcctatcacagccccacacgctgcctcttcatgttcctccttagaagcttagatttgagccagcggcttcagaaggaaataggaacaggttctaaatattgagttagtggataccgacaggggattccttccagaactttctagaactctacctggtgtctttatatcttaagtaatggtgaggagaagtgaaactttctaagcactggtaaagtagactcattgttagttctagtaacttcagcagagttaaaattaaatggtctatcaggtcttaaaaacatgaagataccaacaactagccaaagtagtgcctgcatgataaactaaagcagaaaaatctcctctcaggctcctccttcatatacaggccttgcccggatactgtcattgctaacactgcaggggtgtgtcatgcccatcccctaaaagagctttgtcacagtcacccccccacctagcatatatatatgtgtgtgtgtgtgtgtgtgtgtgtgtgtgtgtgtgtgtgtgtgtctcctcctatgagctgaggatatgctgggcctggagctagggactcgaagttctggggtgttttgttttgttttaagggttctctctctttctctctctctctctctctctctctctctctctctctctctctctctcaatggttgatcactcatccattgacaactcgcatagtttattcggtgtgtttaagatttattttattttatgtatatgagtgactgcatgtgtatatgtgcacccatatgggtgcctggtgcatgtggaggtcagaagagggccttggatcccctggaactggagttataaaggattgagagccaccaggtaggtggtaagaaccaaaggtggtcctcagagagaacaacacgagatcttaacctctaagccattgttcagcccatcctatttcctttgatagaaggtcttggtcatctgctgtggtgtacataaaagggaaggtctagaagtaagtggcacttaggaattttgttcagtaagtagttctctgacagctcaaagctgatgcatgatctagccatcatctcctcagaaaaggcaacacaagagacaaaaggcatatgcccattagagtcagacattctgggtctgatctattgttgaggccggccagcggctcacatgtctgggttcgagcctggaaggcatcttggaatctggaagaaaagagggagctaggctgcgcgagaaaggatggaaccaagacattagtctgatcaaggttcaattttactgtttggagacactcggttataaagaagaggggaggggcccattcccgccaaatcatcttcggagtctagttgcaggtgaccacgtgaatactccggaacagctaggcggcaggtagtagcagtgggagtggcagactccacccccgatgatttggtgataacagtcaaacctgatcagccagatttcaggctaaggggggggggggaggttacaatctataacactgttttgtgagttagtttggaaaggcctgcaatgctggctataggaagttatgctaagagtacaccataacattccatgattcctgtcacctcctcttaacaaatttctcctatctaccccgtgtgagccatcttgttaaaggcttgggtttccagaatataattcaatacttaactcatttgagcaagtgttccatgctaggcagtggctggtgttgagaaccgctgcagaagggagagccattcacgttggagggcaggttgccaccctaaccctgtgaactgcacttggatttagccagttatccacagaagagacggtaaagtcaggaggaggtcgtgttaagagagattccagagcagctggtgggggcaatggagcatggaaatgatcgtgcatcattaaatacatgtacaaatttaaaaaaaaagaattgtgtacattctaaaggttcaaagcataaattccagttttacatttgatttctcttttattcagctgacatgctgtttctcattctctccttaaatcagtttgatcttcatggctagtgttcttagggctaataaattctttgaactatacacttcaggtaacatattcttagttaaaggactcctgtaatccccagggtacttcagagaagtcccgagcctatggttgggttaccaacggcagcagatgtcagtgtgatttacagcagcaaaacaggtggctgtctgcagctgtgtccttgtggactctgttcccacacaattagtttctcgtggttttaagagagcgtgtccaggcaacgcctgcttgctaggaacccccatccctcaccttgatctctctcttcaaatcacatctcaaagccacatctgcagcagggctctaggtttgacccccacgcccctttcttcctcctgtctctgatgggcaattctgtccattttatgaatctctggcagggctggctttatggccagttccaaaataccttttaaaggtcccagaaattccaattttctaattaaaaaaaaaaaaagtcactgtttagtagtctccaaaaccatgattacagactcccagctctccgtttctagttttttcaaactgaaaaatgatacttccccagctgacaatttatttcatagcaggatcatatcccagccatgttatgcaataccccccagaaacaagtgacaatatttactgagaaggatccccatgctgaaagcttgttagaaggttgttacgttaacactgtccccggaaagacttgaatgagtgtccccacacacaggcagtcaatgacagcgtaaagactatcagcaagagcaacttggtgaattggtaagtttaactgacgttacttacaggagtttaggtgagaggctaccggcaggagcttgtacaaatgaagcccattgccaaatgcccactccagcacagacgatgcccacaaataccggaacaccgaaactcactgtacaacttgcaggcagctcaacaggatggagtgtcatgtctaaaaattctgttgtttctggttctcttccaggcagctcagcttgtctgaggatgtctcttactccaatataagctttgggaaggagaagcatagtgaatacactcagtttcaggaatttcctaaagattttgagttgttcatcctgagttttaacactttccctacaggatggaggctttcaccttcctctcaaacatcctgagttgtaagaaattgctctctgagatggaagtctttatctcagagaagttgctacagaacaaagggatttgttttgtagagtttgaactctatatataccagagtttgaactcagggcacacgactctaccaactgtgtagtctattttgccatgcagattcacaaaggtgtcagaaaaaaacttgtaatgggatttttttgtttgtttaactatgaccatatgcagacatggtatagaaatattctttctgtcattttagggcataaatggaaaagatggattaccaggtgctcaggtatgaaaaaaattttaaatagtataaattcttaaattttctaatttgtaagtgtatctttaatgctctaccatttaggtcagtcagactaatgattttggcaagcagtattttttgtttttgtttttgtttttaccattgatatctgttttccagggcatcatgggtaaacctggcgacagaggccccaaaggagaacgcgtatgtatatcactactatggttgccgttcacatttcactgatacaactgtctgaccatataccaaagcatgtagacaactttgattctccaaacatgccatgattagggtgtatatgaaacactgtctctactgggcatagaatgtgacctgtaaggaggtcataccacaggtgtgcctgttcgttgtacagacctgagtctacacttctatttcagtttggagagtggtttgctaccttccagagacacacttgccagctctaactaccacgcagatcctttttgccatctatgggatttctcacccacagagctactgctacttagagtttcatgcatttgtttactacttcgacgtttggttgtcttgtacattagagaggccttattggcatctacccacttgatacagtagcaccatcatctctccaactgtcattattcaaagcatctttagacatcactaaatgccttctagtgggcaaaactgcccaggctaagaaccactgacccacttactccactgacccccttattccacagacccagttactccactgacccagttactccactgacccccttattccactgacccccttattccactgacccagttactccactgacccccatattccattgactcacttactccattgacccccttattccacagacacagttactccacagacccagttactccactgacccccatattccattgactcacttactccattgacccgagtggtatctgcactttcactacaactctatgtgatgctgttgctgtcactaaaacttactagtattttctgtaatgaatcttatttttctagtaggactcatgttcctgaagccaagactttacttggcataagcctatttagggacattcttatgtaagtggctgcagatgtgtttgtgtactggtgtcttattcattaaggcttctttttattgttacatgagaaattcatgataatcgaatgacttataaaaaaaacaaaatagcacacgtttaagaagaaaaagtcttccaggcatctttacacagggataaatacttgatacttcaggcatatttcactcttccactcttacctacaatcaatatcaaatatatatgattttaaaattagattgacagtgttttgaaaatgtttgttctactggcagtcttcaatggctgttcacatcttcccaagtccctattctctaagcagttattttcctctccagttttttaaaacatcctttttcaggtgtgtgtgtgtgtgtgtgtgtgtgtgtgtgtgtgtgtgtgtgtgtgtgtgtatgcacacacatgggccacagcatgcttgtggaggtcagaggataacctatgtgggtcagttctctccctccaccatgtggcttgtgtggattaaatccaggacatcaactatagtggcaggtgctatgtgcaatttcaggcctgaaaagataataggtgatggataccagctcagctatctcgccaggccatagacacataatgttaaggtttcactatgatcatggaatacagatcatagattcaggtgtactaatatttttaatcttgcatatttttccaagcacgagctgcctgtatatcaataagaccagcattggtattttggccatccattttctttcttcctagcgtctgtgtcaccttctatatcttatgatcacattaatatctatgagtgttcatttattttcactattttgttaaatcaagacaaatacaggcaggcttttcagagaccagtaaggttaagggaatattatgtaaattccagaccccctctaacaccagcccatcacactcagccgagacctcacttcccgagtcatgtgactgaacactgaaaacgtgtgactgaaccacttgctatggtatcacagtggtatatgtttctcttcactggttccatatggaaacccatgtaaactatgactacagaagaaaccccaaaggaccttatgagtgccaagtgaaaatgcaaaaggagagacagccataggattcagaacaggttttgagtttttctaggtgaaaaacttctgttggtcatctccttttacaactacagaagagacccagacctgacatggcagtgggtgcggactttcaaaagtgacatcactctagactgaatgaagacaactgttgtggtcactaggatctatatgctgagtgattccgaggggtcattgtttgaagcattttacttgggtatattaacctctcggcattcccctagctaaaagatattatgaatattaatattcccacatgctaatggtacaagttggggtacagaatggaagtatgtaacccgaggatccacagtaaatggatgccaggatgaatcctagacttttgctcttcaccgcagctgaggcattgctggaagaggtgattccttacttctctccccaaacagggtgatcagggaattccaggagacagaggccctcaaggtgaacgtgggaagccaggtcttacgggcatgaagggggctataggccctgtgggaccagcaggaagcaagggctccactgggccacctggccaccaaggccctccaggcaatcctggcatccctggcactccggtaagtggagcccctggcttatactgaccatgggcgtttttaataatgaaataaattatggccattttgaagtatataaaataagctggtctgcgccattatttgaaagtatatgccaggtcctctgttgacacctccctacgttttagatcttcacagccaacctggaagactagaatccttttccttgtgtgtttataaatgcagaagcgcaatgccttgatcaagatcaaagaattagtaagagagaaaaatccagatctggctgactccaaaatcagtttgtttcggtttgatgcacaggtttgggtttgtttagtgtgactgggggaggggtggtatttgaggtgggatcctctggcctcagcctcccaagtgctggggtgacaggtatgtaccacccacacatgccccaaaccatgctcttacaattctgtctgtagttgctcctcatacaaatataaacttctatttcacactgagactctattcagttggtccctgaacaaatctgccctaaaggaggaattaaagcaaaagtgtgatcagagcagcccttatctcactgatatttcagggagattgatcaatacgaggccattcacctgaggagtatagtttgaaaacctctgtgacaggaacaaaggaggatcctggattaagtaggagaggtaaagaccgtctctctctctctctctctnnnnnnnnnnnnnnnnnnnnnnnnnnnnnnnnnnnnnnnnnnnnnnnnnnnnnnnnnnnnnnnnnnnnnnnnnnnnnnnnnnnnnnnnnnnnnnnnnnnnnnnnnnttacctcattgctaaatggttcctgcagaaaacctgcaaaacttaactatctgtttctaccaaaatcactcaattttctctctctctctctctctctctctctctctctctctctctctctctctcacacacacacacacacacacacacacacacacacacaaagtaaaataaatacaaataagaaacaaaaaaaaaaaaccaagaaacaaaattccacaaaaactaaaatcaaaacagtcaaaaaaaaccaagaagaagacaaaaagatgcccaaacaaaataagaaatccacaaaaataccactgagtttgttttgtactggacaattacatctggacacagggcttgcccttacatgtggttttgttgtgacactctactccgttagagagaatcgattcttccctttgccaacaggcatcaactgcaaatagctagagtcttggttaggggtggggcctgtgtccacttccctcttggtcccttcatcttcatccaagttcattttccccatgcacatctgaaacaacgtaacagctctaagaattcagcaccttatgagcacattgagtgaattgtcttttttcttttttgcatttctaaatgaacggatttttgtgaatggagaagctcaccatatgatcagcccattcacaggcttaacatacaaacatgaggaaggactctgtagatagaaaagatgggaaactcaccaaaacagggacttttaaagattaagcacaactgcctggtttatgggaatgacagggaccatggctgaaagtcacattgcatggagattttccactgatctttccagctcctcatctggtcacatcccactgggctttgttaagagtgtgattggcagtagacatggtctctgcattacaacttctagtgagctccatagtgtcttctctgccatccatggagctgaatacatgaatacaaagaatggtgacaaaatactttgaaatcctggccatcatgagaccattagctcctctttgaaaatatcaattaagcatggctattatgaatgttgggtttttatcaatgggttaaccattcagccactactacttacctacttacagttaccaggtatctcaggcattttctactaaacatggttattatatttatgttactatctaagttatgagacaggcaaacatggggaaaacattttataggataatcctacgatccagcactccatttggggttttcttcctttggagacacatgatgtcacttgctatagtcttcactaggaaccaagagtggatgtttaatggttattgcttggtaacaccgtggcattgcttgtgccttttaactgtatgcaataaagtaacagaaaccattatcttctagttatctatagccacatttctccactcataggagaaatgttagcttcactggttataatcccagcccacagcttgtaaagcaactatgatcttcagcttatcctagcatgtgctctaagaaggtatttactgcccaaaatagcacactgccagaagcatttcacttgacaaacatatatgcacaaaagtatgccaaccccatctctgtgccttatccactgtgcgctgccctgttttaacacacattctttttcttcctgtaggctgatgctgtttcatttgaagaaataaaacactacattaatcaagaagtcctaaggatttttgaaggtcaggtttgctttataatacttctggattttttacttcccatccccctgtggggaatcccttcagtgacattcttgaactgtgacagcaatcttagcagattatccgtttcctggaggggcagctcctgttgacagtacacttaagttaaattttctgtttaaactgtctttccgtgtcgcttgtgaataagacaacacaggtaaagtaccttctgtttatgtaaccacctttcaaatatttcagcacccatcggtctcgatcttaatttccctatagagtaagtacatctagctcccccatccctgacaccctggggagatgctggattgatcaatgagtgttttaactgaggtgggttacagtgtcttttgatctagaccagggtcagcaaacaaaaactaccagccacatctgtctcctaaaggcagacttttatgtgacccacagctgggaatggttctcacatacgtacgttaaagggtttcccacctgaaatccagatctccagtcatgtgttttgggtacagtcatgctcacttcttctcatccttctccacagcaaggcaaaggtgaaaaggtgaatagatgtggcagacttcctgtagctagcaaagaattaagtattcattatctgactcttttcagatagcccagttctgcatgtttaagcccaaaataacactgttttaaaaacaaaacaaaacagcatcttatatccctcactggtcttgaattcttcatgtagcccaaggatggccttgaactcctgatgtttcttcctctaccttgccagtgctgaggctgcaggcatgcaccaccatggctgggtcattaatgtcttgctggggctgaaacctagggctacatgcatgatagcaagcactctgccatctgagccgcatcccagcccatcattgctttttctaagcagttaagtcttgctgataactccttctgagtcatcgtttaacagcattgttcttccctctgaaaagtttgtaaaagtcaagagtttctcattattatctttaaaatcttaaacaggtgaactcatgtttactatggtaaaatctcaagtgacttcggtaatatagcactaaatgcctctagtctaaggtcctagtcttgacttccagcaacaaaaatatatttttaattacattaaattaataaacaaaattcaagtgtttatgttctgacatggtccaacctgaacatagtctctggtgagaagtctggtgtaattctaataggtcagcctttatatgttacttgacctttttcccttaatgcttttaatattctgtctttatttagtgcatttgttgttctgattattatgtgtcgtgaggaatgtcttttctggtccagtttatttggagttctgtaggcttcttgtatgttcatgggcatctctttctttaggttagcaaagttttcttctataattttgttgaagatatttactggctctttaagttgaaaattttccttctcatctactcctattatccttaagtttggtcttctcatcatgtcctggatttcctggatgttttgagttaggacctttttgcattttgcattttctttgactgttgtgtccatgttctctatggaatcttctgcacctgagattctctcttccatctcttgtattctgttgctgatgctcgcatctatggttcctgatttctttcctagggtttctatctccagagttgtctccctttgggttttctttattgtttctacttccatttttttagattttggatgttttttttttcaattccatcacctgtttggttgtgttttcctgtaattctttacgggatttttgtgtttcctctttaaggacttctacctgtttagcagtgttttcctgtaatactttaaggggtttttgtgcttcctctttaaggccttctacctgtttagccatgttctcctgtttttctttaagtgagttattaatgtccttcttaaaatcctctaccaacatcatgagatatgattttaaatctgaatcttgcttttcgggtttgttggggtatccaggactcactgtggagggagtgctgggttctgatgatgctgagtggtcttggtttctattagtaagattgttacgtttgccttttgccacctggtaatctctgtccttagttgttacagctgtctctgggtagagctcgtttctcctgtgattctgttagcctctgtcagcactcctgggactccaactctctcctgagtcccagtggtcagagcactctctgaggacaagtgtgcagaggtctggagctcagctctgcctcctggctgaagatgaaggcctgaatggggaccctgtcccagaagctatgttgcttctgcctcccgcgtgctcttctgcggagactggtgtcccaacatgtgtatctttagttgcctgtaaccacacaaagaaaaacagcaggagatacacattttttttgcattgaaatctaaaaaatcctcatctcacttttaatatttacaggtgctgctgtcaatgataaccctttatctcaggaacgaggttctgaacgcaatttcttaaagatccttgctatcaccctatttaggagttcagaaatagtcaggcagtggtggcacaagcctttactcccagcacttgggaggcagaggcagacagatctctgtgagtttagccaacctggtctacagagagagttccaagacagccaaggccacacagagcaaccctgtctcaagaaaagaaaaatagttcagtagttagaccagcatctggaggctaattggtaatcacagaaaccgggctggagagatgtcccagtggttaagagtatacgtttgatcctcagcctctacatccaagtgctcaaaagcatccttaattccagcctcagagggtcagattctcttttcctgactccaaggacaccagttctcacactctctactggccacgtacacacataatttcaaaatgaggatcattaaaaaaaaaaagtgccagaaactataacctcatgttatcagaaaaagaaaaaaaaaatgacatgttgagacacatctggcaacaattttcaaggttctgttcacactgtaaaggtgtggcccatgacatccttttctgtgcagtcagccaaggaagcgcccagttcttaaccctcgaagaagactccagactgccccagctagccactctgtagctactttcatgaaaggctgtgggtctcctccagagagtcagggaattggttctggcaaattcacctaacttctaagtagctcagcctttaagcctgttgttctttccctttggatttctgctcaaccactgagtcgccccagccaggaagctgacatctatggagtcatccccatgtctcctctggcttcgccgccatctcctgctgcctctcacctagagttctagtgaatggcaagacactctgccctctggagaacttgtctacctcgaaagccacagatagcctagtctcaagatacttttctcaagagacccaatagaaatcactttcactttaaacttttaaactctaattccacgtgtgatgttccctctcctaatggatctcctgacaccagcctggcagatctgtcttcatccccacacaacgtacctgaaacctacagtgtagttatttggcacttaaactaatttgccctcaaatcattttcagtcagtccatttgatttttttttccactcagaaatcacccttgctgtggcttctgaacaccattttccaagaataaaaaagcagtgctccattttcacaaatcatactgttgcaaggtcagtttccttctccataaacggggagattaattgtcacattttaaagcagtttcagcaaaatagcgcagtacagttaagtgctgggtttcagtcacggccgtctacagcgtgttccttagaggtttcactaaagaagctatcagtaagtacccctgctgtctccccacactcttcttcatgttcagaacctcaggaaggtcctccctcatcaacaggcgcccaagcatgtcctcgggagctcccagttggtcactgtcccaggtgttcactcagatggctcctcttgtgaaactctaagccaggattcatgttttcagttctcctccagggattcatcagttctctttgaacttctaaggtgaccctcgcagaactctcaccttgagctatcctccagaccactaccctgtccttcagcaagctaaatgcaccttcccaaacctgacaaatggagggaagcaattctccatgatctcatctgggttccaggtggatcacaatgcacaagcatgcattcctttcactctaaagttagatcaaatccccactttgattggccattatgtcgccctttttgcaagcaaggtagtaacgtagagcagagatgggtgctatccagaagactcagcttagcatcttttgtccttatgagggcatagcagttgacaagaatactatccacataagtcaggagcttaccatatcagagaagtgtaggttttgctgtgacctcaccctacaatacttgagcatttgtatatctatggaataaaagttatgatgtagtatatagaaactatcagcctctttccattctttaaacccccaaagccagacctgcatctgagggaaaagagaaaagttagggttatttttgcttttggatttccagtgttcaggaatcctgtgttttctccatttttacatatatttcatataatgtatatgaatgaacatattatcctattcaatttcaaggtaacgtgtctttcctctctataatagctacaatatttataagtgtgtgtatacttgtgcacatacgtagcaaccagtagatacacatcctgggagatacagttcatgctgtccacagcatagtgtggtttttccatttgctgcttctgtttgtctgagactcacacagaatcggtcacatggcttacaggactccctctatctccaataacctgtggttgtctgctcatacagaaggacaggtgctgaagcctactgaatgtagaacttgccaactgtggttttcccgtagggtagctagctgggcattctaaatgaaaatctttccatttcggtacccttaagtctatcttgtggggatatttatttattaatttatttattatactgttaaagccagaatctcactgaagtctggggctgtcaatgcagagatagtctttctcccctttattcattttacgttttgattaaaatataattatctcactttcccttccccttttcagaaagggaatctttggttgctgggctggctggggaagaccctgactagttgtttaaagaaagacaaacaccccattggctatctgatcctcagcttccaaaatgttgctgctactttctcctttcagggtcctctcattcttgagttttatgactttacatgtttcctggtagtttttcaagtatccacaagagaattaaagcagatgtgtgggttcaaactactatctttacccataacatttcaaaccaacatgcttacaaaggctgtggatggatttagtattatgaactacaaaataaatgagtccataatgttattaaaaattaaaacaaacctggggaataattcagatctcacaaaaacttacggttacattgccccataggagaaaacctacatataaatttagtcatgtgggaaagccatgggaaattatccaaaaaagtgatttccaaaacaggttatttaccctgtgagtgaattttattttcactttaaggctaagagataacaatattattaagtaatgagtacttcacttgagaaatacatcatatagccaacggttccataatggaagatcagaagaaaaggagataatgttttactaagaaagtggacaattaaacatgaatagacattaggagaaaaggttatttttctttaaaaaaaaaaaaaaaaagaagggttatttttctttgaaaaacaaagttacaaatttgatttgtaagacagcaggcaggggagagccaggtgacacctgaatgtctcttacttcttcaatattcatgtcttcattgtcgtgaggtcgttctcccaagaaccaagtcagtctcgcctatcacacagctggctctcattttggcctcttctaacgtctttaatcttctgcttcgttagaaagcagagccaaaaaaactgtttaaatgactgaggggctctgaaaacagagggaaggcgattaagaatacaggccttcagaattcatttagatgctcagaaactattattttcaattatagtgcattagggtaaggctcagaagaggtaattagcttatgctaaatatttgtttcttggtgtagcttaaagccagttcatttacagctagtagtaattctttaaaataattgtattttactaaaattattgtttaacccccccccaaaaaagtacttgtaaattcatttcatagcttaagaggaaaaattagaatggtgactatttctgtttaggcatttaaggtagtaggcgtgtttcaaaccatttatttattggtatgtgttcatgagcacatctacgtgtgttggcacatgtgccatcacatgtgtggaggccggaataaaatttgtaggagtcagttccttcttctaccatgtgtatcacagggattcaactcaagcgctcaggattagcaccaagcatccgagacagctgagccatcgcagctgcaagttagctttccaaattacccttgaactactaagatagtttgtctttggaaaaaattgcgtggtgaagagaaacattagcaactttgtttcttcttttcatagcaagactgtacctattctagtttctctattttaaaatcaatcatccatatatgagacttttacaatgtcaatgtataaaatataaccaaagcaagtttaaggggcccggtggcagattttatttataagtgaattcatgatgttgtcaaaacggattccagattaaaatactaagtattctcttgagatgaaatttaacggagtaatgctctatgtgacattaataaccaacaattcagtgtgacaagaactgtcatgcagcacctgacagatttctagtctttttgtctcagactattccaaaacagctgaaggtgctctgtggatatgcctcataatatatgtgcctataaaaacatgagttcttacttaaatgatgtttaaatattaaattctttgattctggtacaatagttggtgagaaagcccacaatccctaatccaaggtcttgcttcaaagaatgtttagtcaggtatggtagaggcccaactagagggccaggagttcaaggccagcctgaagagaccctgcaagagaccctgattttttttttaagtaattaaaaataaaatcaagcatgttttgttcagttagttagtaatatacccatttcagaagttaattttaaattgaaaattcttattcatggtttcatacttagagtctttgaacttctctgttgtatagttcttttaagtttcattaacacaccaactttctcatgcctttgtttttgtgtgaaggggtgctgtatgcagggtaggggttggttggaatatgtcccatgtggccaagtacatccacagaggctacacaggatgttgaatttcctcctctattatccccaccatcttcccttgtgacatggcctctcttggaacctagattttgctttcctgctaggttgatgatcactaagagtccctgtgatctttctgtctctgatctcctcagcactggggttgcagaggcacacaaaccctcacagcttttacatgagtgctaggaatttgaacttgagtccctatacttggcagcaatcacccttatccactgaataagccccaagatgctaactttcctcattgcaatcttcctctcatctcaatgtatcatgccattaatcactgtctgagacttagtagttgcatcctgctataccaactatacagttgttttcatgagcggatgataaacccctaagagggtctgttcagttaattattctctgtcatctatgggtacttttgccaggatgcctatatacggttttgtgttccaggcagtttgttaaatgcataaacgggaaagcatcctgtgttaggaagtacttaatttataaaggcgtatcactcgatgcttaacaaaaccatggcatatatttatttacctgctcttcctaacaacacagataatgtgttcatttcctgtgatttgtcttctccattccaatgttttcttgggctcacagagacatgcattttatcgtttttactgctgccattacattcaaagggcggtatctcatctgcagcaatgatgcatctcctttccttttaccatagtcattctcctaacgacctgattgaataggggacacaccagctggacatacaaccagaaaatgcataataatgggggaatatagaattcctcctttaaaaagtaaaagtaaaatgacagcttttcagtgactaaatgtctctgtgggaaaggcagtattgtttacatcatctgttgacatgtaagaaaatgcaatccctacacacgttagggagtcggaagggtcaacaacttgaagctttgcttagtcattttcttcagcctctaaatctggggtgaggtcacagaaaggaccccagtcagctgcaaccatttcagtacttgactagggggaaagggtagacatctgtaagctcacaagcatccctgtacagggcagcatgttgaatgtccccactgcatactccttgccaatgggcttcctcgggggttaccagatgggcagcagccagagagctcctttatgaccactgcgacacactgcccattctgctttttctctttcataagaaatataaatctagtcatcactcaaaatacaggggtcgggttctcaccagggaagtgagcattaaagaacctgtgaatatgcttaaaattgctacacatatatggatagaaaataccttgcatttgttcttaaaacaattcttaaatttttctccacgagtcataactgaaagttgattagacacgtgttctgcactgctgggttccaggaccactggtaactcctcgaccctctgaacaacccagatcttctgcttctctttaaacaactccatgcagtttattctatatattttatcaaaaaaaaaaaagaagaagaagaagaagaagaagaagaagacaacaggcagaccagttgatatagaatatgtgcttcagttaaaaattgattttttttcagctttgtgttaaaaggtttggaaatgctttgacataaagactcttccatcacatgatgtattttttttctttcgtaaatgaagagaggatggctgtgtttctatcccagcttaaactgccagcagcaatgttgtctgctcaagctcatggaaggcctggcccaccagggaaggacgggttacctggacccccaggagatccagggccccaaggtaaggctgaaaatgtaatacgtgcttgcatagtcctcaatatttatagctgcaactaaaacatatatatatatatatatatatatatatatatatatatatatatatatggtgtgtataaaatggcttgttgtggactgtcttgttaataatttattttctaatgataaatattaattattactacttcaaatttaaaatggatatacctgctgttctaagttcattttaatgatatccagagtaaccataatactgtctgcttctctgtcattgtcacagaggaatcctagagttgtttctgtggccatcttactgttatgtgagattcctcatctgagagccctaaagaaactggaaaacaatagccttgggagacactgctacaaatagtcattggggctaacacctaattggggaagtttagactgatgctatagtagagttttactgatagtgacttttaaagtataaatgtaatcttttgtttttatttctgagaatttcatacctgtatacagtgcaatattatcatatctgctcacttcccccatttaagtattccatgccccctcaacatgggtcctcccaaatccctctctttaaaaataaaatgaaataagtcactaagtccagtcggtgctgccatacgcacacaggtgtagtgcatccagtggttacactggaacatggaaggcctactaagtagccacttcctccattaagagtaagttctccttccccagcaagataccactgcccctagttcccatataaggtatggggcctgggggcaatctacaccttctttgtcagaatctttggatagcttaatcttggtaaggtcttgggcagataaccacaatgtcctttgaactttaaagggtactttgtgtgacttgtaaagacttcaaatccaaacttatgttggcaaagaaaaaaaattggccacttatgacacctggagaagacaaatgctcttgagttttgcttgattcggttattctgacacagctgttctgtaaaaaaatatggttagccatctgcatactgactagatagacctgtgtttagatgattcatgaattctgacagagaaatgccaaatttagtgaatatgaatcataaaaataaggttagagaagctacagccacaggcacccttgctcccaccaaagttattcctaagcattctgggaagtttaccttgttggagttgaattaaattctactcaagaatccattttaataaccatctgtgcatgggatccacttgaggacagacagtgcatccccattcccacgttcccaattcttataatttctgccagtgtgcaatggttggaattctaagggtttttcagaggatatataaatgctagatcctcaacagagagaactgtttggtgggtgggtgcttttggttgtggtttgttgcagtttgttaggtagtcatgcatgaagagatgagaaaaagaagttagatatccggactgtgatcaaacttgcccccaaggagctcaatgcccctcttcagcaggaaatagcctaacaatattgtcattcccttcaatctgttttttctctcctgcctaacattagggggttgatagggtaggagaagatgggtagagaaggtgtgtgcagaaggtgcgtgtatacacccgtgcagaaggtgtgtgtatacacccgtgcagaaggtgtgtatatacacctgtgcagaaggtgcatgtatacacctgtgcagaaggtgtgtgtatacacctgtgcaggtgtgtgtatacgcccgtgcagaaggtgcgtgtatacacccgtgcagaaggtgcatgtatacacccgttcagaaggtgtgtgtatacacctgtgcaggtgtgtgtatacgcccgtgcagaaggtgcgtgtatacacccgtgcagaaggtgcatgtatacacccgtgcagaaggtgcttattaccttttattcattggatctcctctgaagtcagggggcctgagaactggaaaggcctttaaaagccatctgaagatgtgacgctctaaccacatgaagaataagccctgctgattcaagtaaaaaaacgatggatggatccttcagatctcagtagtccaagagaatacacaaaatgcaaagttgcagtgacgtggtaaaacagagtttagagcagagtcaccttcccacataagcccctagctccaggtatcatcccaagccttggaggtccatcacaaaggttctcagtcagaggcaataccaagtcaacaatattagtgaggtctttgaaaaacaaggtttatatttgctactgagtcaactgatcaaaacatgaccttcccccctttgcaatggatttctgtggggttaacccactgctatgtgtgcaatacagactattgtttataagagagatctgaggtgtgattcttaagtttgaaggaattctccacatggtttccagttttcttaaaacaagttctactaaaatagacaaaatgtcccaccagagtatctgacaacaggcatacttagaagtggctgcctcagcctttagcttcccccatgggacttctaacagtgaatatatcttgactacaagccgttgattgacacttctactccttataatgttaaagttttcagaaacacagcagaaaatcaggtttacaaaaaaaatgagattcatattaaaagaattttgcctatagtcatactgtactggtaaccctaaaaccacaaagaaatctcatgggagaagagaaagaagaagggtgggaggagaagggaaagaaaggagaggagagaagagggagaggaggtaaaggggggaggaggaggaagagagggggaagtaggagcagcaggcgagaaagtggcggctatgttggatttttgctacttttctgggtgggcattcaaaatggaagggttttctctggtaataagtaaatactaagttctcagaggatgaagccatatgtgtgattccgatgctcttctctctcctatttaaaaagaaggaagaaaacatccattcagcctcaagtgcgcttggctggattagccctctttatctggcccacacaattgagtttgacaaaagggtgaaacgcaaaccacagcccagacaggggcaggaaatgtgcctgctgcactgttccagggtacactggccacttggacactgtgtctgctgggagcccatctaaaagatgagtgggtttttaatagtacctgtcaggaaagaaatccattttaatttaaactaagtggcaatttgaaatatgcaccaggaaaggggtctttttatcaccttcattctctttatatgtttaaggaaggattttaaaaaaaatcaccaaccttgtaaagtgtcctgtgtttattctgcaaagcaggacattgtaaagacaagggaggatttgatgtgaggccatcagaaatgtgcccaagggagggctgttctcctacaaagacttactaatgaaaaatggtggatattcttccaataaccccatcttctgaaaggacagtgagtgcttattagggaagattctaaggaggccattttgtttgcatccttccagactcccaagagagtgatgactgatgtcttactaaagtccaaagcatttctatagaacttttatctcagccctcatgctaggctgtgactgtgaacttcccactgtgcagagagaaagcactgcccagtgagcttttgcagaagagtttttataaaatgtagttgatgttttcaaaaaagaattgacggaaatcttgagaaatggatgccacatgtataaaccccggtcatttcagaaaaaacaaaaaaaaacaaacccacaggtagacttaatagatgaaaacaaggaagaggagggaaatggggagagatgaggatgaggaaggagaggaggagggggagggggagactacatacacaccattgattttaatagaacatactgggagtcactgttcttctttttgagtttttaaagttcagatatcatcagcttctaaatccaggaaaactttttttttttttaaatccagtgacccatgggatagttgatagttcttggatagttctgacctgtccaaaagaaaaaagaaaaaaacttagcagttgaccgcccttgaaaatgggacatgattgtaagtcaagatggccaaagggttcagcagccagttagtggagcaagacaagggaagctaaacacactctgtgtgtatgtgtgtgtgtgtgtgtgtgtgtgtgtatgtgcatgtgtgtgtgtatgtgcatgtatgcatgtgtgtgtgtctgtgtgcatgtgtgtatgtgtgcctctgtgtgtgcctgtgtgtgtgtgtgtgtgtgtgtgtgtgtgtgtgtgtgtgtgtgtgtgnnnnnnnnnnnnnnnnnnnnnnnnnnnnnnnnnnntgtgtgtgtgtgtgcgtgtgtgcctgtgcatgtgcgtatagggtatggccatacgaatgcaatgccggcagaagctaaaactgtttctgagttcatgccgataatgctgcttctccactcaccatatattaactatccagttcacatttatcatacattaaacatgaatacgaggttgggcacagtaaagcacagagaatcttacagatacacagtgatagattaaagtcttagcaagccaagctttagtgagatattgccactacacatagtacttaaatgcactattcatatcttcatatcttctcttatatgtttatgatagatgtgtgagccttcttcaacagaaattccgacgggggtctaggtacatgtaatggggaaggcacacacagaaagaattttgttgtgtatgagaacagagagcatatggatacaggctttagtgtaataattaaatgaattaaatagttaataaataactaattaaataaagtaaaggagcaagcaactcataatctcaatatcagcagaacacaaatttgagtcaaatcagtttaagataaaagcaaaaaaggctttcctatgacatttaaatgctaaggaccagacattttagctatgctgtgagagaagagttcgagaaattctcaaggtacttaagatgtatttttttcaagttcgacttttattatttaaaaaaaataaataaatctcactatcaaaatcgcggtttgttttaacataatgcataattgccaggttctccatgttttatcacgctcaagctacatttgtgtttaatgcataaatgtgagataaatcctaattcatgatgagtaaagaaatagcgttaacagcaggactcgggaagcagtcctttcatgcgcatcagtgcggtacacgcctcctttcacgcctccttttctatctgtctctcatccaggctaccgaggacagaagggagaaagaggtgaacctggaattgggctgccggggagtccgggtcttcctggatcttcaggtaatagacttattatctctatgcaaacagttctctcagaatgggccttttctcccctgtggacctcatgtgttcagctgaaggagagagggaggcaggcgggatcgcatgtgacccaatttctcatggtctgttttatttcctcagcagtgggtttgccgggctcaccaggtgccccggggcctcaaggacccccgggacccagtggaagatgtaatccagaagattgcctctatcctgcacctcctccccaccagcaggcaggcgggaagtgaaaaagacggaggaagacatcgcgtctagtgctatctccaggccacttgagccgccactgcaggcttcacaaccacgtgctctcaaggcttatgagtttttggactgctttattttagttttctgatacagaagcagacatccaaagcaaccatctgagtcctattctgacagtaagagcagatccgtattttcagatgtttgccaacttctttccatatgttctgtttcattgtggctctgagttctacggcttcggaagaaaaatgcaagcgagcctgtcatgggctcttcagaaaaaatcacgtgagacgatttggtacacagacgacacagaccttgtgaactcgtcaacgtgactaggttttgattcctgaattttaacttttctaatttatcttgattattttgttcatatttaaatttactatcgttactttagtttttctttctgctcttttgagattgaagtagtacattactgctgttgactgtcttaggactgatttttacaagaagtcctatactgtcctacattcattcgatttatgcagaaaaaaatatgcaataagagattcgcttctaacttattaaaaacaaaactatgtgagactgtttatcaagaagcccccaaactcatcatagccaacatgcttttggctttttttggagcacgcctcactgacacgaacacatgctacatttaaaaaaaaaaaaaaaaaaatgaagaatcaacttgaccctatacccaagtctgtgagtctccgatggtgaactaaaagtggtttgtcttctcgaagccattcttggtggtaaaggcgccatgctgtctttggtacctgacaggttttagcagcctagcaagacctttgtgcttctttatgcattcttttttctgactttatgatccccaggcccgacccgccatcagagaaaagcacaggatttgtaatgacgcagaaaagaggagtcctcgtcttggaaactgagagcggagggtcagcaaaggcatgttgagtgagtgaagccctcgtgctcttaagaagattaatgttttctcagaaaccatcgaaaggtccagctcagcagaggaaagccaagagacttcacccgaaagtcactacgagcttcaaaaccgcgtgctcggggttagggatttgacttcgcagtggagagcttgcctagcaagcagcgtggccttgggttccgtcctcagccccgaaggaaagaaacaaacttgctctgaaaggaagcaaaatcccagtggtcttggctgaatgtctttttactccctacctgttcattgcttggagaaaccttgggtggggaaaactgatttgctagaatactgagcacaaggtacaagggctttgctgatagttagctggtgggtaccactgacgctgagagcatgccaccagagcccttcagtcccatgcctctaagagctcaggattagaggggatgattttggtctgttcattgaaaaaagacaatgggtatagaaaagcaacccactgaaagtgggaaaagctgtgaacagtgttttcctgagaagcatgcctgacataaggcagcgtttgtttaaatgcacccatgatttgaactggttttcattataaacagatgagctgctggcccggtactgtcaacatggctgtgcataaaataaccttttaggtatttcatattgagttttgctgtatatttcaatccaagtttatttattttccaagtctactttatttatttccactgttttgggcttgaaattgcttattcctttgttttcttttgtattcaatacctacaatggtgctctgttttaaacttgcacaattggagtatgcaaatgtttgcttatgtatcttcatagccaactgataatctaccccctaaatgtatataaggtgaaaagttggtgctatgtgtatattttgagcttctaatttgttgaattttctgaaaacatacactttacctgacatattaatttacttgaatttgctgtatagcaaagacttttctatgttttcaaagattatttttcatattaattgacaggttatttatccttttgcattttggattattcaaaaatatttattttgtaattttaatattttcacggacatttggctggtggtgggcgattagtgtatttgggtgtttgggtttttttgtttgtttttttgttttttggttttttttttttttttggttgatcaattgatatgatgcaactcattttcttgttttgcaaattatatttacttcagttccacagaacagaattctttcttacaaattggatggttcttactcctcctttttctaatttttgtgactgtgtgactggcttatccctgtttcaaggatttagatttgtccccatggcttgaggagtctgtcacagtgattcaagctcatttttagagcttgggacatgtgactgaatctgacataaccagagagatgggactgggttatacagctcaaaccatcaatctactgttattaatcttcagattttcttttcttctgccttggctctatttgtaacaaaaggctttaaggagcacttggtcaggctaacacaacaaagaaattggcaggttctcagccccttcgtaaaaacgaacaggataatttggtccccaaagcaggataaggaatatcccactaactaaccatttgttcctggtattgtttatagcaaaggaaaagaattatcgattttctctcattttgtacttcagatatgctttaaatacaaaataattacaggccaaagtggcaatgttaaaactgttttttttttttccataaacaaggatgtctgaattcaagtcctaaattatgccagttcagttagcaatttttggtagaattttcttatgtagagaagatctgtcctccattaagatctgctttgcttttagaatctaaagaaagagaatatatgtgtgcattgttcctcccagctgaaaacatcggctattactcctaaccacagtggaagtcagtcttaagttcttcaacttcttaccttaaccagagctgtgcaatcacttcaaccttgtgtggtcccccccccccacacacacacacacactttggaaaattaaacctttgcctacttatagagattaaggaattattttatgatatactgcctaaattctagtttaatgctcagcttataaagtaatttccatgactatgtcttagacattaattatagtttagctcttctgcagcttctcccacttcagagaagcttatgatatacctcctattgtccacaagatggtgtctgaggcaatttgttcagaactgaacacagattcacagaagcctagaacctggaaaagtctggtgaacaattcagtcacacattggcctttgcactttatttttggaaatattctttgtaaattatatttcattttactaattagtatttttacaaattttcagtatctttgtaaagcaggcacaataacttttggtttgttgatttttttcacttgtatttattgactgtgtgtatacccatacttgtatgaaaatctgctataaggttgtcttatgctactattgtattttagtgactaatgatcacacaccggcacacaactgcattcatcctcccatgcacacaaagcagatactcttttgacaaatgaaaacacttagcttaccacaagaagtagacaatgtatactgcatgatgtctaaactcttaactgcactagataaatttgtacagggtctattttcctagaaacatggcactatttaacaatggttttcagaattccatctttttcttttaatgccatcttttttccagtgttggtaattctatccaagacagaagtaagtccagtgatgctgaggctgtctgaatgacctttgaatgacctttgaatgacctttgcatgacctttggaagagctgagcagagttgacctttgcccttgttctgagttacttttcctacttgttatctgcatctactttgtaaagattcatggtgttttctatcctggctacatagcagggactacactccccaccctggcccttttactcctcttctcccagagattgaccagacctctatgaggagattcctagcagaatttaattattaaccctttaagtcatgtgcatcaatgtcaagtcgatcataggcattcattcgtcagccagtaggtatagtagcatttgttgtgttcaatttgttcaatgaagaggacttacaggaatcaggaaaagaggttatctgtgtttctatttattaatgtagttggagctatcatggtaacatttcactgagcaaaatcatatagaaaatttcatcattttggttgaattgacctcagctccaagaggacacagggaacactagggcagataagtagacccagcaagaaaaaaaattatccaaaagatgatacaaagctaggaacatctacatggaaaaactttcaagattaattccagtagtgctttgtggtagaactcaagaagtgaacttcttgcttcagcaatgtaggcatcactaaactcaggaataacaacttaaaatttaactcaagtctggtgttggcttgaccataataaacttacgagcatcttaaactaaagatgcaattttacaactttttattttgctgtggtacttaaggagttttgggagaataaatactttgggtgaatttaaattccgattgtgttacagaataactacttattttaaaaataatatttggggggtgtatttttatccattttgtttgttcactatcttacctcatcatctacttaaggtttaattttattacacttatgttaagtggagtgctactccgtttattaaaaaccctggtgaatctatgcttgcaggcattgcctcctctagctttattatgtgcagtgaacatgtttcctctctcagcaataaaggagtcgactataaatcagggaactccaaggtgcgattcttagcactgtgtctacactttagcccttctcagcagccgaagcgggagaacaattctattctgctaagtcttagccacactgaagaaacttcataatcagtctcacgccaggagcaaacccacagcatccagggaacctgagactgctctattccaagtactcacagtttgaacttataacctacctccctggcagctcatgaaaagaccagtatattgatttcagatgagaattataaacaacaccaacagccagagggagcccaaaatgatgctctcttctagcagagactaaaatcaatttagactctttgctggagagaactcgaagaaagctaagaagcatcacaagtaattgtccccttttaataagtttgtcagtgtgtcaataagtatttaaatgcacactgtgttttctaacagaaattaattatgataaaataggccagtggctttgtgtgtctctatggattagctaatgacttaaacagttcttgactgttcttaccttcatatttcctcatgataaattaagtaggtgctctctaaggaatattattatcttctcttatgcagctgtggacttggagaacaaataaaaacacatcaaaacagacttaaataagaagacacagatcccaaaaagtttcttagagtcaatttcccccatttgttctctttagaaattaatgtggaatgaaaggcattatacaaaaacatggtgaaaagaaagttagtgttaatcgccatttattaagactacaaatatttatcacacagaatccttccaacaaccaaatctatcaaatatgctacagttcttcagatagcattctaaatacaatttgagtacgtatattgcatatgcggtattacaatcagccaatttatctaatatattctgagccaacatatatcacagttcagcatcacaagtttattttttaaaaaaaaaacttaagtacatacctggaatgtattttactacataaaatggcaatctacaagtcttaagcacaaatattatcttgtagttttaagatggcttaggaccattttcatttgtaccagaataaataaaggcaattcccttgacatttggaattatttgtgtcatgagtgattttcaacctctactggttaattttaaacctgaatttcatacctcagaaacactatgatatctccaaaattaaacagtacgaaagcagggacttatattaagcacactttgggtcagatctaataatgtttaaggattgcaatattggtttaaccagcatgaaatataaagtattctgactgacagacagaagacaatcacccagtcgcatcagtgaatttgtatgctcagactgcaaaatgatttccacattccttaaccaacctgttggctatttggagtgagaattaaatcataccgccttgggagcactgagcagaaataagccagaaatttgctcttgattaatacgttagtgtctaagcaactttaattacctacacattcccctcttggcaagttctcaggtggacactatccaacttttaaaactacataaaagctgtggagatctctgctttgctaggggtgtatatgaggtctgcctgtattcagcagctgtctttcgcagagagggttcactaggcaaaacttgtttgctagtttttcgtcaggaattggtgcatctgtaagttgtttaatttaactgaaatttaccatagattgttcttatcatttggaatgtgcgagtttcgcataagcttctgtaagtggctgttcccaacactacttactgtctctgtggagcttgttatacagcctagatacgcatcaggtttctgtaacaggtgggtgaactgatatttggatttttttaatttcttacaaatatgactttatagaactgaagaacatgtttaattacataatttttctttttctgtatttgattatgtcactgcaattaaaataaaagcactttgatgcaaagatcatttcttttcctgatttggtatgtgtcataactcttttctagaaagtatacaccgttttgacctgatgtgccacaaagagccataacagatgcctccatttctaaactctgtcttccaaacagggaaaaggacatccttttaatctagatacggagcactgatctacatagccaagatgggacctttctctttaagaagcacagagctacatgctaaaaagcaatgtaaagaaatcccatatatatttcatacttgatttaaccaaacaattcctatataaaatattcacatgaaaatcatttgatataagcatatcatttgagcttaactcttctttgatctgagatccataagctaagtgagggcctattggcatctgtgtgggacaagtttggcatgtccactgggaaataagaagtatattaggcctggttgatagttcaagttcatgttgatggcatagcaagccaatctgtttatgcaaacaatgatgagatgctaaagaagtcattgttaagaatatacacctttaatcctagcacttgggaggcagaggcaggcagatttctgagttcaaggccagcctggtctacaaagtgaattctaggacagccagggctatacagggaaaccctgtctcgaaaaaagaaaaagaaaagaagaggaagaagaagaagaagaagaagaagaagaagaagaagaagaagaagaagaagaagaagaagaagaagaagaataggaggaggaggaggaggaggaggaggaggaggaggaggaggaggaggaggaggaggannnnnnnnnnnnnnnnnnnnnnnnnnnnnnnnnnnnnnnnnnnnnnnnnnnnnnnnnnnnnnnagaagaagaagaagaagaagaagaagaaagaagaagaagaagaagaagaagaagaagaagaagaagaagaagaagaagaagaagaagaagaagaagaagaagaatatagctttcttaggactaatgagatggctcagaggttaaaagcattggctgcttgctcttccagcggtcctgagttcagttcccaacaaccacatggtggctcacaaccatctataaagggatctgatgccctcttctggcctatgactatatatgcagcagcactcatacattaaataaataaattatatataatatatacatagatatcatatataaaggttttaaaagagaaagaaaaatatagtcttcttaaaaggaagaggtgggctttagtacaataatattggggtaacctcatttcctcagtggacagatcattcagacagaaagtttgcaaaacaaaactgtctgaactgaatgacattggacccaacagacatttatagaacattcaactgagatgcagaacaaaagatattgctccgttttttaagctggagtgttctcactgtgctttgtgtttggttttacatggacagcctttgtcaggcatacaatgacatatccaccctcattacttcctccctttagtcctctccattctctgcctgcttatatgcttgtatactgtctcactcttgtcttcttgtcatatgtatatacccatatgaatatatttaaattaattcatgtacctatgaagagttctaggacccataagagcgaaaacattgtatttttatttctgcatcttatttacatcagttaataggatgacctcctgttctgtccattttccaggaaatgacatcattgagttctttatagatcaataaaactccattgtgtgtgtgtgtgtgtgtgtgtatgtgtgtgtatctcacattacaccttttctttatttcttcacttgtttgtggacagtcagattccatactttagctgtgaatatagctgcttatcaaacaaggatatgtaggtatctctgtggtacgttgacatagactcctttgggtatgtatccagaagtatgatgctgggtcatatggttgttctatgtttaggttttagagacaccactatactgaattccacagtggataaactaatttatattcgtatcaacagtatataagagttcacccttcccccacatcctggctagaatttgctgctgggttgttgttattgttatttaataacttggaggagatcgaattttcatgtagttaatttgcattttcctgactattaaagttgtttaacattcttcatgtttttttttaattctttgggaattgtgtacaatgtattttcaatatattcacctcccctctcccaagcccaccctactcacccaactttttgtctgctgtttttaaaaacccaacaaacccaatctgtgctacctgtatattgagtttatggccatccactggaacatggtcaacctgccaggaaccactccctcagagaagtctgactctccctctctcatagctcttcagttaggggtaggattctagtgcccacatcccttctccatgttggtttctctaagttgaacttgcccgggccttgtgtatgccaatcgcaacagctgggttcatatgtgtggctgctgttgtgcctagacaaatatttcattctagtcacccactgcttctggcacttagcatatgtctgtcctctcttctgcaatggtcccttgagtgtttatggtcatcttttgagatgagattgctcctgaccacgcaagtgctttaccactgtttacataaacatgttgtctttctattctattcatatctcaaaatatcttttgaaaacagtcgattcatttcatcagtatgttgattgattgattgattgattatcagttagttggttgactgactgggtttttttgatatttagttatttgagttctttatatattctagctattaatcttctgccgattatatagctggcaaagattttgcccctatgctgtaggctatctttttactgtggtgattgttgcctttgctactcaaaagctttcttaatttcatgtaactcaatttgtcaattcttgaccttatttctttacctattgcagttcctattaggtagtcttcctatactcctatctcttgtagtctttttactatactgtatttgagcagttttaaattttcagctctaaacctatttcatgtattctaatttgattttggcacattttcagagagaggaacctcactttatcctccagcacatggctagacattttttccagtactattcactaaaaaggctcacttttgaccagtgggtgctttgatgctttgggcatctttgtcaaagaaagacacaagagtgtctgggttgaattctgtgtcttttgctgtatcccattgacatgtgtgctgttttgtgccagtaccatgccaactatgttatgtccttctctagagtaaggcgaagtcaggcagggactgaggtgcccccagcattactcttcttgcttggaattactttaaatactcatattcctcgtggatgcatgtaaactttaagatttttttcctagtcctaggaaggatgctactggagttttttatgggatcgccctgtatatacgactcagttctggttttgcaaaccttttggaaaggtttcccattttctggtgtaccttcactttttctttagtgtcttggcattttcattgtaaatggctttcacacctttgattaggattaatcctaagtgtttaaaaatattttgaagctat

SEQ ID NO: 1169 - DNA, 4205 bp, Mus musculus
gcggtgcggcagccctgtccggactccaccgcgcctcccaggggctctgacaccaacccaagatctgtggccatttgtttccatggttacaaggcacaatgaggcacactggctcttggaaattgtggacctgggtgacaaccttcctgcttcctgcatgtacctgtctgacagtcagggacaagccagaaacaacctgccctacactgagaacagagagatatcaagatgacagaaacaaatctgaattgtcaggctttgatctgggagaaagctttgctctgaggcatgcgttttgcgaaggtgataaaacctgtttcaagttgggaagtgtgcttcttatcagagacactgttaagatatttcccaaaggccttccagaggaatacgctatagctgtcatgtttcgggtacgaagaagcaccaaaaaggaacggtggtttttatggaagattttaaaccagcagaatatggcccagatatctgtagtgattgatggtacgaagaaggtggtagaatttatgttccgaggtgctgagggagatctgttgaactatgtttttaagaatcgagaactccgtccactctttgatcgtcaatggcataaacttggcattggcgtgcaatcccgagtcctttctctctatatggattgcaatttaattgcaagtcgacacacggaagaaaagaattctgtggattttcaaggaaggacaattattgctgcacgagcttcagatggcaaacctgtggatatcgaacttcaccaacttagaatctactgcaatgcaaacttcctagctgaagaatcatgttgcaacttatcacctactaagtgtccagagcaagacgactttggaagtactacttcatcctgggggacctctaacactggtaaaatgtcttcatatctgccaggaaagcaggaacttaaagacacatgccagtgtattccaaacaaggaggaagcaggattaccaggaactctcagatccattggacataagggcgacaaaggagagccgggtgaacatggcttagatggtactccaggattacctggtcaaaagggagaacaaggacttgaaggcatcaagggagaaattggtgaaaagggtgaaccaggagccaaaggagactctggtctggatggcctcaatggacaagatggtttgaaaggtgactcgggtcctcaaggtccacctggcccaaaaggagacaagggtgatatgggacctccagggccaccagccttaactggctccataggaatccaaggtccccagggtccacctggaaaagaaggccaaaggggaagacgagggaaaacaggacccccaggaaatccaggacctccaggaccacccggacctcctgggttacaaggactacagcagccttttggtggatatttcaataagggaactggtgagcacggagctagtggccccaaaggagaaaagggcgatactgggctgcctggatttccagggtctgttggccctaaaggacacaaaggagaacctggggagcctttaacaaaaggtgaaaagggagatagaggagaacccggcctattaggaccacagggaataaagggggaacctggagatcctggtccccctggtttactaggaagcccagggctaaagggtcagcaaggacctgcaggttccatggggcccagaggaccaccaggagatgttggattgccaggagaacatggtattccaggaaaacaaggcgttaagggagaaaagggagatccgggtggaaggctaggccctcctggacttccaggtctgaagggtgatgctgggcctccagggataagcctgccagggaaaccagggttagatggaaatccaggatcacctggtccacgtgggccaaagggtgaaagaggtctgcctgggctccacggttcccccggggacacaggcccaccaggtgtaggaatccctggtagaacaggctcccaaggaccagccggagagccaggtattcagggtcctcgaggtctgcctggattgccaggaactccagggatgccagggaatgacggagctccagggaaggatggaaagccaggccttccaggccccccaggtgacccgatcgcacttcctctcttgggagacattggagccctgctgaagaacttctgtggcaactgtcaagccaatgtccctgggctgaaaagcatcaaaggcgatgacggaagcactggggagcctggaaagtatgatcctgcagccaggaagggtgatgtagggccacgaggtcctccgggattcccaggcagagaagggccaaagggaagcaaaggagagcggggctaccctggaatacacggggagaaaggcgatgagggtcttcaaggaatccctggcctctcgggagctcctggcccaactggaccccctggcttaacaggaagaactggacatcctggtcccactggagcaaaaggtgacaagggtagtgagggaccccctgggaaacctggacctcctggaccccctggtgtcccgctcaatgagggaaacggcatgagcagtttatataaaatccagggaggggtgaatgttcccggttacccaggacctccgggccccccaggtccaaaaggtgatcctggcccagtgggagagcctggtgcaatgggcttgccaggactagaaggatttcctggtgtaaagggagatcgaggcccagcaggccccccaggcatagccggcatatcgggaaaaccaggtgccccaggccctccaggagtaccaggggagcagggtgaaagaggacctattggagatacaggttttcctggaccagagggaccctcggggaagccaggcataaatggaaaagatggattaccaggtgctcagggcatcatgggtaaacctggcgacagaggccccaaaggagaacgcggtgatcagggaattccaggagacagaggccctcaaggtgaacgtgggaagccaggtcttacgggcatgaagggggctataggccctgtgggaccagcaggaagcaagggctccactgggccacctggccaccaaggccctccaggcaatcctggcatccctggcactccggctgatgctgtttcatttgaagaaataaaacactacattaatcaagaagtcctaaggatttttgaagagaggatggctgtgtttctatcccagcttaaactgccagcagcaatgttgtctgctcaagctcatggaaggcctggcccaccagggaaggacgggttacctggacccccaggagatccagggccccaaggctaccgaggacagaagggagaaagaggtgaacctggaattgggctgccggggagtccgggtcttcctggatcttcagcagtgggtttgccgggctcaccaggtgccccggggcctcaaggacccccgggacccagtggaagatgtaatccagaagattgcctctatcctgcacctcctccccaccagcaggcaggcgggaagtgaaaaagacggaggaagacatcgcgtctagtgctatctccaggccacttgagccgccactgcaggcttcacaaccacgtgctctcaaggcttatgagtttttggactgctttattttagttttctgatacagaagcagacatccaaagcaaccatctgagtcctattctgacagtaagagcagatccgtattttcagatgtttgccaacttctttccatatgttctgtttcattgtggctctgagttctacggcttcggaagaaaaatgcaagcgagcctgtcatgggctcttcagaaaaaatcacgtgagacgatttggtacacagacgacacagaccttgtgaactcgtcaacgtgactaggttttgattcctgaattttaacttttctaatttatcttgattattttgttcatatttaaatttactatcgttactttagtttttctttctgctcttttgagattgaagtagtacattactgctgttgactgtcttaggactgatttttacaagaagtcctatactgtcctacattcattcgatttatgcagaaaaaaatatgcaataagagattcgcttctaacttattaaaaacaaaactatgtgagactgtttatcaagaagcccccaaactcatcatagccaacatgcttttggctttttttggagcacgcctcactgacacgaacacatgc

SEQ ID NO: 1170 - protein, 1152 aa, Mus musculus
HQPKICGHLFPWLQGTMRHTGSWKLWTWVTTFLLPACTCLTVRDKPETTCPTLRTERYQDDRNKSELSGFDLGESFALRHAFCEGDKTCFKLGSVLLIRDTVKIFPKGLPEEYAIAVMFRVRRSTKKERWFLWKILNQQNMAQISVVIDGTKKVVEFMFRGAEGDLLNYVFKNRELRPLFDRQWHKLGIGVQSRVLSLYMDCNLIASRHTEEKNSVDFQGRTIIAARASDGKPVDIELHQLRIYCNANFLAEESCCNLSPTKCPEQDDFGSTTSSWGTSNTGKMSSYLPGKQELKDTCQCIPNKEEAGLPGTLRSIGHKGDKGEPGEHGLDGTPGLPGQKGEQGLEGIKGEIGEKGEPGAKGDSGLDGLNGQDGLKGDSGPQGPPGPKGDKGDMGPPGPPALTGSIGIQGPQGPPGKEGQRGRRGKTGPPGNPGPPGPPGPPGLQGLQQPFGGYFNKGTGEHGASGPKGEKGDTGLPGFPGSVGPKGHKGEPGEPLTKGEKGDRGEPGLLGPQGIKGEPGDPGPPGLLGSPGLKGQQGPAGSMGPRGPPGDVGLPGEHGIPGKQGVKGEKGDPGGRLGPPGLPGLKGDAGPPGISLPGKPGLDGNPGSPGPRGPKGERGLPGLHGSPGDTGPPGVGIPGRTGSQGPAGEPGIQGPRGLPGLPGTPGMPGNDGAPGKDGKPGLPGPPGDPIALPLLGDIGALLKNFCGNCQANVPGLKSIKGDDGSTGEPGKYDPAARKGDVGPRGPPGFPGREGPKGSKGERGYPGIHGEKGDEGLQGIPGLSGAPGPTGPPGLTGRTGHPGPTGAKGDKGSEGPPGKPGPPGPPGVPLNEGNGMSSLYKIQGGVNVPGYPGPPGPPGPKGDPGPVGEPGAMGLPGLEGFPGVKGDRGPAGPPGIAGISGKPGAPGPPGVPGEQGERGPIGDTGFPGPEGPSGKPGINGKDGLPGAQGIMGKPGDRGPKGERGDQGIPGDRGPQGERGKPGLTGMKGAIGPVGPAGSKGSTGPPGHQGPPGNPGIPGTPADAVSFEEIKHYINQEVLRIFEERMAVFLSQLKLPAAMLSAQAHGRPGPPGKDGLPGPPGDPGPQGYRGQKGERGEPGIGLPGSPGLPGSSAVGLPGSPGAPGPQGPPGPSGRCNPEDCLYPAPPPHQQAGGK

SEQ ID NO: 1171 - DNA, 347814 bp, Homo sapiens
  misc_feature (1)...(347814): n = A,T,C or G
aaaaggatgaatttgaaaatacggccatatattatatattaatttgagatgatattggatcattgatatagatatatctgtggaacacaacagagcaagagaattgtaatcagaaaaaaatgtaggtcagttgtgatggttgaaattgagaatggtaccggaaaagttgatggaaacaaatcatagttcagagaagtgagtcggtaaaacagacaagttgatgagaatggagagaataggttaagtgtgctcaaagggaatcccaggtttgagaccctctggaatgtagacactagtttggaagtaacagaagtaataacaaaactgaggaaatgtaatagagttggacatatttcaaagtagtacaaacattaggaactagggagtatgctttctgtggaggcagagagcaacttcaatagtactatttttttgtcccactaagtaactgaaattatgttcactgagctttcttttagtaatttttactctatttctccatcattcttttctttatgcccatcattctacagatgttaagcccatacctgtctatattacttaatggttcccaacctttgatttgtttatttttagtccaagtgtattgccttagactgtatcattctacagattgatcccatgaatacctactaaatgtcaagtttaaagaagacacagataaataaaatacaatctgttttctccaagatgttcaatatagggaagagaaagaatgcaaaggagttatagcagtgcagtataaagtgtgcagaagcataagtgggtattgagctctgttgaatcacaggacagtgagtagtgaactctccctggtatgattctcacagacttcacagaggacatggcatttgagctacacgttgaaggcagactaagtgttttccagatcggagaggattggaaggactttccagtagccaaaaaagcacatgcagaaacctgtgaattgttaataatttgatggcggagagtgtttggaaggaggtagcaggacaggtggttggacagatgagttgaggccccactgtaaaagagccttgagtgcctcactttggagtgggcaatgaagagccaccagaaaactttgagcagggcagttaagtgactaggtctttgttttagaaatagaattcttgagaagtagggaggtggaaataaagggaacaagatggagaaaaggaatccagttaggagtctattgcaattttccagattaggaatggtaaaaacgtgaactaaggcagtttcagcgaggatgagaaagttggtatggattcaaaagacgtttacaaatagatttgatagactttgacagagatttgatatggggtgagggtgaataaattgaagatgattttgaaatttttaacttgagttcctaaattaatgatgatgcctgtaattaaaatgtgtaggtcatgaggtttctgtagaatataatgagggcagaaactttgcctaaattgcaaaagacatctgcaaacttacttcaatttaattactccagccactgataaaactaaggaataatgctagacctagtcgtaaactcttagggatattttgcctgattattggcttgaattttttactctataggcttggctcttcagctggttttctctaatagtttacagactctactatagcttcactaaagacagattctaaagattggtgaaagaacagatgtgtaacacctgttgtttttgcttatttacacaatgtgtcacttcataacagtatgaccagatttgcctggtggagttacgtatgtataggcatactggatggtggtcaagaagttttgatttaaaaatcaacctacacagtcacacattatttccctttataataaatgctctgaaaacatgagttctttgagtcatttaacaaattaaatctacttttttgagagttgagatgccgtgtacattaaatgtaacaacgtatgtaaagcaaataagtgttctctttctatttcctcctctttctctcttttttcatgggtcctttccatattattttctattttggtgttggctttaacactctgaccttttacctaacaccaagtttcaaagatgtacaatgaacactttaaattgttagatggcttaacagtaaaaatgttaatgtttcacaggcagatttgatttggctcactcaaaaactggtgctgagaggctcctgaccatcttatttagcaagtccaccatttttttttttttttttttttttgaaacggagtcttgctctgtcgcccaggctggagtgcagtgctgtgatctttcggctcactgcaacctccgcctcccaggttcaagtgattctcctgcctcagcctcctgagtagctgggactacaggtgcctgtcaccacacctggctaatttttgtatttttggtagagacgggttttcaccatgttggccagacttgtctcgaactcctgacatcaggcaatctgcctgccttggcctcccaaagtgctgggattacaggcgtgagccaccatgcctggctgtacatgttattctttgttttttgtttgtttttttgtttgttttttgtttttcattttaactctttagtgtctctcaaagaaaacatgatgtttgtttacttttgagctctgtgaccagagtggtacaatggactttccctatttggctcactgatttatccccagtgattgttacatagtggaacctcatcctatcaataggtatcaataggctatctagaggccaggtattaataggatatcaatagatatcaatagaatatctattgataggatgaggtttcttaatgcctatgattaatggtaatgagtaatgattaaggtttcttaatgtccctctctattcattttgtgttttctatatacaaataaagattaataagaacttaaaaaaatctatatccttattcaaatatctttggtttcgataggtgccttaatgatttcaagagctagattaagaaagttgaagggacaatggcgttttaaaattcacttacccagctggtacccaaaattattccatatggcaaatgatggtgagaataatggaatggggtaaaggttagggctaggccttcagccacttattatctttttgttgccataagaaatatattacagggacggctgtctgaatgattttaagactttataggctccatcaatgttgtctactcaagactgccagtgctgggcacactcaccattgtgattttggtgctttgtagcactggggaactctggggtctggccagaatcttgatagaaatagctgaaaatttaagagaatgcatgtaggaatgtgatatgtctgtcccacatcctgagagtaaacattatgatatagcagtaaaagcattttagtcaggcagacttggacttgaatcccaggctttgggattattctatgagcgttagtgttttttatgtgtaatatgcggatataatacctgtcttcagtaccaacattaggcctgctctggaccctacattttagaacaccccactatagtcttgctctggatgtgcacccgctctcagagttaggagtttacagagctaaggggacctgcccacctaaaacctgagcttctagaccagtctctgaataatcaagatcctgaaattccctgaaaaaaaaaaacgatccttaatcccccgcagcatctaacagaccctgtcgttgggtccatcttcccagggaaagaccacaggtgtaaacactcctaggcccaaggaatggtcaagagttagctgtttgcaggcattatggacacaactttgacttactggcatatttacatatgcgtgtgtgaggcttttcaagctgcagatggacccaagaaagaaaaaaaatgagggatgaactttggtttaggccagaggccaactcatcccatatcacctgctctgttacattctaacttgacatggactttcaagactttatgaaggtatttgctgaagaaaaatgagaaagcatattattttttatgagtgttattagctttattttaactttcaaatatttaaacatatggtatgcagacctcttgccctgtacccaccctcataataattaacccaatgccttaaagaccccacctcttaatactgtgacattggggattaagtttctaacacaggaaatttgggcaacacattcaaatcatagcaccaatattctccatagccttcttaatatgtactgtgagccatctttggacaagtttgagaaaaaaatttgagggccttaagaaacctcaggatccacatatattagcttgaggttcttcattagccactccattgagaaagcattaaagatctatattatagcttaacttttatctgggaggagcaacacattaaaatctgacaacattggcttggttcatttgtaaatctatcttgataatcacctagctgggacctgtggggacaggaaggaaatgtggcaagttttgatgagcaaggaggttgtggacaaagccaataattgagaaatccagggaaggtaccagagatgtgttcagagcatcaagaagaagcctgagaaccgcaggtgtcagggaatggtgagaggtttctggtcaggaaaaggagaggttcagaaagacacaaggcaaactttgcccttgtcagttttgttgaggtcaacctaccggtgcctccagcaaggtttacaatctgaacaatttgtttttaaaacatatacaaggatttattttgagagcttgatgaaaagtttttcaaatgttcctagctgaatgggctacacttccattttatcaggatctgaataatagaaccctcaaatagcgaacacattttagaaatgtgcagagaggctgggtgtggtggctcacacctgtaatcccagcactttgggaggccaaggcaggcggatcacaaggtcaggagatcgagaccatcctagctaacacggtgaaaccccatctctactaaaaatacaaaaaattagccgggcatggtggtgggtgcctgtagtcccagctacatgggaggctgaggcaggagaatggtgtgaacccaggaggcggagcttgcagtgagccgagatcgcaccactgcactccagcctgggcaacagagcgagactctgtctcaaaaaaaataaaaaaaaaagaagtgtgcaaagagaaataatattcatgataatgacccttgaaagattataagatcttgtaatgccttaagaattatttttaaatattgaattatcactacagattccaaaataagtatatttcactgtatctcaagatttgtaaattggcagtctcttactttttaaaaattcaacaaatatttattgagtctctgattttccaagtactgtgcaaggcacctaggatacagtgatggacaagacagatatagtccctgctctcatggaacttagaattgagtggggagcaataaacatacgtatacagaaaaaataatgtctaagctagagaccaatgtgcttcttggtcaggtaagggcttttgcgcatagtaacatttaaattgaaaactgaaggatgaacacagaatgttccaggatgaggaaataacatacacaaaaaccttgaggttgaaaacagcctggcaatttcatcactggaaagaatggtaccatatgaggctggagatgtggttaggggcctggttatttgggacttctaggctgtagaacagcttttggactacattcaaagtacaatgggaagccattaaaaagcttgaagcaaggaagtgacatgaaccaactctcattttaagaaaagttctctactgctatgtagagaataactgtggtcagaattcagtaatgaatgaattcagtaattaattggaagctgttgaggggtctagaccagggtgatctgaactgggatagtggcagagaaataagagaaataagtggatgtgagatgtgtttggggtaacactgacatgacttgttgatggtttggaagtaggagatggggataaggaagacagaagaatcagtggggtccttgggtttctggtttgatcattttgatgggtagtaattactgagactgggaagagcatgagaagaacaatttgtggttggaaatcaggaatttatctggatgtattaagttatagatatctgtgtgacatctaagagagaattttgaataggcagctggacacacagtctaaagttcagtcaagaggactggatgggagatgtaaattttagattaaccatcttacagataatatttaaagccaagagaatggtgacgtcatctaaggagacattataaagagaggaaaggagggctcacagatcccagtattaagaaatcagatagaagaaaggtctgagaatatttaaaaggaaatctgagagagtgtcagatcagggaggccaataaaagagagtttcaggaaggaaagaattgtcggctattggaggtgccaccaagaattgaagaagggaagagaaacggattcttctttcaagttcctgctgaacttggtgagaggcatttcagtagagtagtagaatggcaattcttcgataactagaacatttagtcaactagccataaatcttattctgcaaatactttgcataaatgagatagaagctaagtggctcaaggaagtaattagcagatgtcaaggtcgaattcatatgcttatagctttgtagccctctggttctttgttgttttaacagggaccaaagcttcggtgaacataaatttctaggctgctttgacacttctccattgtccaaatatcaatatcaacctcaagcttaagagacaggtacaactaaatttttccaattattgtttattaatatgtacagcaaacaattataatatcaggtaccttttgaatattgactaagttaaggccctatataatacacatgcattaaataatttattcctagtattatttccaatttgaagatgaataaattagggcttagagaaggtacatagcttttccacaagtagcagagtccagacatgaagccatgattgtcaccactgtgccaaactactaatttgtcaaccaatagaaatcacttttggttaaaaatataaccatggatttctctaaaaataagatcaatatttatgagttccttcctttgaaataaaattaatttctttaacagttaccaactgacttgaaataatagctaggataattttgcaaagtcatatgaggattaggactatatctagatgagagaattcaaaagaaataaggcttaaaaccagctgtttgatatttagaatgacacatacagttttaatattgcaattgccacttctagctattcacccagaaagatctgaaatcttgaattaattttaaaatgctgatcttagggtatttggcacacacagaataccaaagaagatggtggctttagtttttttccagagtgtctactgatagaatttagacactggtataatgaattcttttatatttgactcttgattaaactttgaatgatggcacccaagtgatatgacatttatttgcatatttagacctcttagaatagctattttaataatactgcaattaccaaatacactgagggagccattatattttcacttgcaatttatttccacattagttgcttcactaaaaaaattaatttaaatgatgtttaagttttccattacaggggtcctatttactaaatcttttatttcagtaccaaaggagtagaagtgtacattcagaaagacaattattggaggtaatacattaatattaaatatgatgtcaatggcaggctcaggtgaggtaggcgttgcacgtattcattttttctttataaacataaggcaagattacttttcacatgtgcagtaatcacttcagtaacagtgattattcaatccaataacaacatagttaagtttatagaaaacatgacatcaattaagccaaaatatgtaaaactaatattcagaaggaaaaacagacttgtgaataatataattatattttaataatatgaatcattgtatattatacaatgcaaaaagcataggcaacttaaacaactggattaaaaaaatgggcaaaggaggctgggcatggtggctcatgcctgtaatcccagcactttgggaggccaaggtgggcagatcacgaggtcaggagttcaagaccatcctggccccatctctactaaaaatacaaaaattagctgggcatagtggcaagtgcctgtaatcccagctactcgagagactgaggcaggagaattgcttgaaccaggacctgggaagtggaggttgcagtgagccgagatcgcgccactgcactctagcctgggctacagagcaaaactctgtctccaaaataaataaataaataaaagggcaaagggcaaaggagttgaatagacatgtctccaaagaagatacacaaatgattggtaagcacctgaaaagatgttcaacatcactaatacttagggagatgcaaatcaaatgcacagtgagataccatctgacacccattaggatagtaattatatatatatatatttatttcttttatttatttatttatttttgagatggagtgttgctctgtcacccaggctggagttcagtggcacaatctcagctcactgcaacctccacctcccaggttcaagtgattctcctgcctcagccttccgagtagctgggactacaggtgcccgccaccgtgcctgactaatttttttatatttttagtagagaaggggtttctccatattggccaggatggtctcaatctctttacctcgtgatcgcccgcctcggccttccaaagtgctgggattacaggcatgagccaccacgctcggcctatatatatattttttaaaagacaaaatagcaagcattatctaggatatggagaaattggagcccttgtgcattgttagtaagaatgaaaatcgtgcagctgttatagaaaacagtagtctggtttctcagaaaattaaaaatagaattattgtattgtattgtattgttagcaattttacttctgattctatatacccaaaagaattgaaagcagggactcaaacagatatttgtatatccatgttcatagtagtagtattcacaatagccaaaagatgggagcaacccaaatgtccattgatggatgaacagacaaaatgtggtatatacatacaatgaaatattattcagctttaaaagaggaggaagttctgaaacaatgtacaaaatgatgaacctttaggacatatgttaagtgaaataaagtcatacagatacaaatactgaatgattccacttatatgaagtacctagattagtcaaaatcatagagaaagaaagtagaatgaaggctgcttggagttgggggagaggaaaatgggaaattattttttaatgagcacagagtttcagttttgcaaaatgaaaaaagttctgcagatggcggggatggttgcacagcaatataaatttatttaattccactgaactttgtatttaaaaatggttatgaacataaattttatattgtgtgtatttgaccacaatgtttaaaaataaaaaagtgtcagtttaagtgtagttgcttaaaaaaatttaaaagcagagaaaatttaactgataagaagctgtatcaacatcaataactaactagaaactaatctgaaaatcttttcagagcccttatcatacagattaaggtatatattgagatacaccattgcatatataatcatatttcctgttatatgatgatatatgatgtaacgttgattggttttgctttggtaacattttctggagatgttgaaaggagctgcatacaataaactttattcaaatttttttttttctgttgcagatccgtggccgttcacatggtttcaaggcacaatgagactcactggcccttggaaactttggctttggatgtcaatatttctgcttcctgcttccacttccgtgaccgttagggacaagacaggtatccaggccaactctttgcctaatcaccaaatgttatttatagcctttaagtcattaaaacaaatcttgttaagattgaaaaggccatagattaatgtactataacagaataaattacaattcattgctttcttccattgatcttcccatgatgcacaataggaattcctaaaattacctcatttttttcatacgcatagtatattagtctatgtttcctttcatcttcaatatttacaagtatacatacatgcatgtgtgcctctgtgtgtatatatgacattatgtatctttccctttcctcttcaataattattcaagttataagtatggaaactcattactaattaggattaacaaggacatatctaatcttaattaggaaaaagtgaaaaatcggataggaggtataaaaggaaatgtagtttaattatatgttcattttgtagtatctcagatgaggcaaacaaaaggttgacagatctttagagcaccttttgaactaaatagacaatatttgcaattattaaatgtatcagtcttttcataaatatttccaaaaggcttaagggcaatttgaaatatttaccttcatctctgcttttttaaattgattatgtggttaatttggaagacttttcttgaacattgagtgtgtataagttacttagctaaatgcaattcatattacaaggttgaattaggcacattggagaagccatttgctagggaaagagaaacttcatctctcctatgcaaacgatcacatataatgtattctgatgataatcacatatgattatgtactctgagactgtattattgtgcctattgttttgaatattttttcaataatttttgctaaacaagtataaacccactctagagagacttttgagtttgaggcacacataaaatataattactcataaagatctaacacatcgtagtctttcagagtgttatgtaagtctttatgattttttattatttggcagaaggtgcatttcctaaaataattcacatgaaagtttgaatattctgttattgtacaaaagacatcctgtggctgtcatacaatttgggggggaaactctttcttcagtgagaaattaatcagctgtgactcatggcaactacaactatgtaaaaaaggaaaagagatgttagagcagcggagtttattctgatacgatttctactcttctgaatttgtcttttttgtaaagaaatatagtaggtaatgtgctttgcaatttaatctgatatgacaggacttttttagttagaaggaagaatgaatctttggttgaatagggacagtttttaggcacatgctagtgggtagtaaatgttcttgatgatagcaaggatttgaaggacctaaataaatggttctccaattttaacatgaaaaagaatcacctgacgtatttgattcctgagacctcctatcgcatattcccattttgcaggtcgtactggggtgggatttggtaatttacatctttaacaagctccacagatgaatctaatgcaggattatctgaggaaaactcttagagaaacacttacctttgggataattaacagacattttggttttcttttttcttttcacctggttaccttgcattttatgcaccattttatgccaaggttacctttttttgttattttattttattgtttgcttttagtaactttttaaaattgtgataagaacacttaacatgaagtctgccctcttaacaaatttttaagtgtataacacagtactgttaattataaacacggtactatacagcagatgtctagaacgtaatcatcttgcataactaacacttccccatcttgggattcccctgaatgtttgcttttgtagctctagtatctcaactctttaatcaggttacatgatgtataggactaccaaaatgcatatattctgatccaatttacttcgctgaattaatcttttgaaagattttcccaacaatgtgaattcaaaattaatctgaaccctaacaagattcacttaacatgaagcattaagggaaattaataaaagaaaaaattacgtttgtttttatcatgctatttggtagagggtgttcgtaaagcaacacgtactgaatgtgtgatggaaattgcttaacttcaagtatcatttgcattaattgaaaatgtcagcacagcactatcaaagggattgttgaagaagatgacaagctgggcatggcctggaaggagacccttcttgtgtcttgtgtatctggttcacagcgcaaggttccctttttagtttcctcatgtgcagacctgcgcgtgtggtcactaaccatttaccggagggaagtgattacatctaaaaataaaatataacaaatctgagagagagtctagggtttcagggctggagtctgtgaagttgtcaacagtttactattaaacctaaatatatgacagatagattggaccttttaattgctgtaccttaactctatggtatgttaaatagttacctggaattgtcacagttgggacagaatttaagagtaatatggagagattcaataataacttgaattttaaaattttgaaggtattaggaattcagtcatttcatattctttcgtcaatttgcctattgagatcatgggataagatatatttgtttattttcccactgcaaatgaacttccatttgaatgtggcagtttcagctcagttacttgtcaaaagaaggtggggaagagaattgtgttaaaatatatacaatgctagaaaatctcaaaacttgctttaattagttgcttaaaactctttcctctaatatagactatgtatcaaataattaaagtttcatctactttctttaatctgttctaaggcaaaagtactatatcatcataaaaagcaataagaaacagaaaaccagagtttaaaaaaacaggctaaataaatagaaatgacagaatgctttttaaataacacattttcctttcattatgataaatcttcagtttaagtgtccagattgacttgattataaatttaaatttaggcctgtaactattcatataagcccttctaaggtagttttctattaattacaaggaattacaaggaaaaaaacctattattccaaaatgtggcttttactagttggcaaacacttcacgcttaaactcagagtaaaatgtatgctgttatatagagaattttattttgtgtttttaagaaattcttgtgttcaacattggtaccatgtaaaaatccttcattgacaaatgtactttgtaactcctaaattttgaaagtggaggaaagcttcacaatgattagataaataatgtagcttctaactaggtattttcctttggaagaattggacatttaagcagaggcatgaaggcagtgtgagggcaaggcacgtgaacacctggaaagcagtcacttggtccccaggctctgaggcggcggcatgcttggcatgtggaagaaatagcaagaaaaactgggggactggagccaagtgaatgagggggaggaggtgtgagggtacatgctcctgagaaatgcatctgtgctttctgtgttgtcaaaatctgatttctaagcctgcaaggtcaaaggctagaccttggacactggtaaattcaccaaagcaataaatcctgtcctatgagacctcttggaagatggtcaacctttgccatgtaggacccttcccggatatcaggtggacaggcaggcttctgaatgtatgcccctcattacctcttggtagccttatgtcacagttaattgaatattgtcatattgtattattcataatacattgttattaaagtacagatgtgtggagatatgtgcattttagcaaagttaaaatataagttataacttgaccagacaaattatgttttctttccctgcaatcagcaaactggtgtataagtaatacaagaaccctcactaaactgcaaagagtataacagaactcgtttacatttattttgcacgatgactgtaactttgattttcccatttgtttttgtattacccaaggaatgacctcatcccctggcttttcctaaggccagaagcctctgtgtccagagagcaactagtccattttcagtctgagtattagcagtatacacagatctttcaggtattaaatcagttgaaaaaacaaaacattaaaataacggattttagctgatctgagcttcttagccattcgagaggagaaaaaaggaattcaacatactttcagggaataataataaaaaaaaagtgtaaaagagggatttcaacatacctatgattaatactgtattaaactgaagatttatatgaatgggtatagaaagtatcagacctggccgggctcggtggctcacacctgtaatcccagcactttgggaggccgaggcaggcggattgcctgaggtcaggagttcaagaccagcctggccagcatggtgaaatcctgtgtctactaaaaatataaaaattagctgtgcgtggtggcaggcacctataatcccagctacttgggaggctgaggcaggagaatcacttgaacccaggaggcagaggttgcagtgagccaagacaagatcacgccattgcactccagcctgggcgacagagcaagactttgtctcaaaaaaaaaaaaaaaagtatcagaccaatgagaggaaaaatgtttaacaaaagatgtgatgttatcttaagattagaatgcctagcaatacaataggaggtcaaaccagtaggataaaacagagattaaggggaaaagtgattttctgtgtgtgtgtgtttaagcacatgtttaaaactgagggtgggagcataatgcacttctactaaagaatgaagataatttcttaggtatgctattattttgtttaaaatatgtatttaagaagcaatgttcaatacagagggggaaaagttggttataggacacttgtgttttctttccactctaccattgagtggctggctttgtgatcttaactcctcttggatgactatgttcttaggttctcaggattctaatttttggaaggagaaggggtaaacatcttttttaaagtatgtattttctttgtaggtaatctagataaaataatgatatacccaaatatgatctagctgccttcctttggctcttttctctttttttttttttccagactgagtctcgctctgttgcccaagctggagtgcagtggcgcgatcttggctcactgcaacctccacctctgcctcccaggttcaagcgattctcctgcctcagcctcccaagtggatgggactataggcatgtgccaccacacctggctaattttttgtattttcagtagagatggggtttcaccatgttggtcaggctggtctcgaactcctgacctcaaatgatccacccaccttggcctcccaaagtgctgggattataggcgtgagccaccgcgctgggcccctttggctcttttcagtaccccccaccacctctgtaagttgcccaggtccttcaagccaaatcaggaggaaagtggggctgatagttattaacatcttagtatgaatttgttaaaaacatttgcctttgcttttgaaaaagatctgttaaggttctctaagcagtgcttcttttaaaaaaattataaatatttaaaaaataaattttattgtgtatatttgaggtctatagcatattatgggatggatataattaaatgactactgtagtgaacagaataacacacctatcacctcacgtagttacttatttttgtaatgagtggctaaatcttatttaatgaaaatctcaaatgcaatacaattttattgtattttgttagtccttatgttgcacattccatctctagatacatttatcctacatatctgctattttgtaccctttgaagtgcatttctccatttcctccctacctcacaccagtgataaatattcttttattctctatctctgtgtatttaagctcttttaaaaaatattccacatgtgagatcacacaatattttttttcctgtgtctggcttattttacttagcatactgtccttaaggtctatctatgctgtggaaaatggaaggattttctttttttaaggctgaataatattccattggataaaatgtctaaatgtaatcacaaaaaccgtaaaactcccagaagcgatcatgggggaatagttccccaacattgaccttggcaatcatttttggatatcacatgaaaaatctcaggctacaaaagtggaagtaaataaatgggactaagtcaaactaaaacacttatacacagtgaaggaagcaatcaacaaaatgaaaagacaacctatgggctgggaaaaaataattgcaaactacttatctcatggttaatatacaaaatttataacgtatttttaaaactcaatatcagtaaaacaaataatctgatttaaaaatggacaaaggatcaaaatgcatatttctacaaaaaagagataaaaatgtccaacaggtatatgaaaaagtgatcaacattactaatcataaaggaaatgcaaattaaaccaccatgagacattaccttgtacctataaggatagctattatcaaaagacaagagataacacaaacgtggcaaggatatggagaaaagagaactctagcacactgttggtgggaatgtggattggtatagccattatggaaaacagtatggcggttctgaagaaattaaaaatagaaccaccatatgatccagcaacccctcttttgggtctacatccaaaaaagatgaaatccctaccttgtgaagatatatctgcacccccatattcattgcaacgttattcacaatagctaagacatggaaacaacctaaatgctcatggatggatgaatggaaaaagcagtgcgttttttttttgtgtgtggtgaaattttagtcattacttttgctatagtccagagagcctttgaaatgacacggtgctttgcctctgtctacttgacataatatttggatatttgagtcttttctgtagttcttcaaaatacatgcacatttactcaaaagtgctctttactttatattaaagtatgtattttaatacttaaagaaatgaacatatccaccttgtgatagctatttccactgccttgccatttttgtgtaatgaatccataatattcatgtattcagattattgtgccttaaatcttacacctaaataattaacatttagttttattttttttcagcttttcaccacaaagcacgtatgctaaagatatgaaatggcatttgatttttataaaggcttttagtgtagaaagactttcataaatgttgctagaaatgttgaattccattcatttcaaatgataggtttattactttgaaatcatcatatatttgctaagtcctcagaagaatttaaataagatatatactgtttccaacttggcaataagccaaccaaagtgtcataatggaaagcccctttctactatcttgagacttgttttgctaatcacctactggggcttccctacatacattgtgagtaatttaatcttatttattatggttacatagtcactcgtagtcattataaaaatataataagaatggagtttttttgagtttttcaagagtcatttttagcttaaattattttctcacagagatgctattttcctccttttgttgagatattacacacaccaaagttgacaaatcttagtgcacagtgcagtgaatttctatggatatatttatacccctgtgtaactactactcagacctaaatacacattctcaaaacccagaagccttctgtgtacctgctcctagttaacatttcaccaaggtagccactacactgacacagattagttgtataatctctagaatttcgtataaatggaattacacagtatgtattaatgttgcaggacttttccttagttcagctaaagatgagttccttgtcccatggccatgaaaattcaggctcacagacaacttgaatagtgagtaagacagggttttattgggtgaaaaggaaggaaagggggaaacaggaactctcactaggccagagtccctgctagagcacttcccaccaggctgattgaatcccaggttccacacaggaaagaggatgggccaggctcctcccgctaaaaagggtgtgaagttcccaaggctccatctcagtgggcagcctggttggaatttctccaaggaccccctctcacctggctgtctcattcctccctctaaagaagtacatctaattgctcttagattaaggataaggatgaagaccaatcttaacttcttcctgctgacagggtgtgctgttttggggaaatggcaggtggagctccctcagaggcctatctaaggtttcccagcagaaagggccattgtcagaggttccagttgcattaccgtttagagtttgatggcctgaaggcaagaacagacaaagccggttattagaaaacacgtatcaaaatgaaacaaggggagggataaggcagctcaaaaattccaaggccttttaccagtttgcacagggagacggaggccaaacacccaactagcaaaaaaaaactttactcttttgccagcatgttgggcttctgggtttccttccccagagtccaatcctaagccaactagtttaaggtttgggaaattaactctttctagtttgaaggatgcatttaaggggactgtcctctagtacaaagacacaattacctatcagtgaagagaggacagaggagaagaaaggaaaaaaaaaaagagagagcacctgtaatcccatcactttgggaggctgagatgggcagattgcctgagggtcaggagttggagaccagtctggccaacatggtgaaacccatgtatactaaaattacaaaaaaattagccgggcgtggtggcttgtgcctgtaatcccagctactcaggaggctgagtcaggggaattgcttgagttgcagtaagctgagatagcgccactgcactccatcctggtcgacagagtgagactctagctcaaaaaaaaaaaaaaaaaagcagtgttcccattttttcttgtttattcacacttctgtattatttttgttttattcttgtccagtgttactttacctttttttgttaactggtgttctttttcccaacctgatatacttgatattcctttgtcagatgtattggcaaagtaggatgtgtacaggggggctgaggggaactagtaacaaggaaacaaagagcctttatttttttaagaagccttttttaaaaaatgcaaaatgcctaaaggctcttgttttgattcgtttatgaaaggaaaacaaaccagttctgtatctatggtatattgttgctctttatcttccccaactctaaccttgaggaaagaactgccatgagctttgtcactatttgtaaagaaaattatttttcttaacgtatgttggagaagactgctaaatagaacttgtatcagactagacagattttaatcgtgactttacatgcaataatgataataatttcatgtatgataattctgaagatatgaagaaataggaaaaccaaagcaggaaaaatggacaagtgatatgttacaatttctcaggagacaccacttgctcccgttctctttttatctcactcactatgtgatctcatctctcctgtggttttgagaggtgaagccaactggacttcctgggtcaagtggggacttggagaacttttctgtctagctaaaggatgataaatgcaccaatcagcactctgtaaaaatgcactaatctgcgctctatgtctagctaaaggattgtaaacgcaccaatcagcactctgtaaaaatgtaccaatcagcgctgtgtctagctaaaggactgtaaatgcaccaatcagcgctctgtgtctagctaaaggattgtaaatacaccaatcagctatctgtaaaaacgcaccaatcagcgctctgtgtctaaaggattgtaaacacaccaatcagcactctgtaaaatggaccaatcagcactctgtaaaatggaccaatcagcaggatgtgggtggggaaaaataagggaataaaagctggccaccccagccagcagtggcaacctggtggggtccccttccacactgtggaagctttgttcttttactcttcacagtaaatctcgctgctgctcactctttgggtccacaccacctttaagagctgtaacacttgccgcgaaggtccacggcttcattcttgaagtcaacgagaccacaaacccaccagaaggaagaaaccctggacacatcggaaggaacaaactccagacacaccatctttaagagctgtaacactcactgtgaaggtctgcagcttcattcttgaagtcagcgagaccaagaacccactggaaggaaccaactccggacacagttttacataggatttatatgtcagtcactcccaaatgtacttcacagccctcacctctcttttgaattccattcctaactgtctatttgataactccattgtttcaatttcttaatggcatgtcagatttaacacttctaatttctcctctttcccactacagattaacttacgccttgccaagttttcttttatttttctagtgggatttatttcagtcaactaatctccctcctccctacattcaatcccttatcatctcctgttggttcttgtatctctcaattccttcccatgaaattgaagatgttttccattttcagtgtcatctctagtccaagctaccatcatatctggcatcacagagtatggcagtatgactaagtttaccaggtaaaatacagatgcccagttaaatttgaagtttaaacaataaataattttttagtataagtatgttccaaatattgcgtgggacatacttgtactaaaaatatttttatttatctgacattcacatttaactgggaatcctgtattttattagctatgtttggtaattttatatatgtgagggagaagaggttatttattacacagagtggtcagggaaggctgccctccaacctcactgggcaggctggttggagtttctccaaggaccccctcccacctggctgactcattcctccctctaaaaaagtacatctaattgccattacattaaggataaggatgaagactgatctcaacttcttcctgctgacaggggttgctgttttggggaaacggaagtcggagctccttcagaggcctatctaagggttcctagcagaaggggccattgtcagaggctccagttgcatgaccatttggagtttgatggcctgaaggcaagaacagacaaacccatttgttagaaaacacatatcaacatgaaacaaggggagggataaggacagctcaaaaattccaaggccttttaccagtttgcacagggagagggaggccaaacacccagctagcaaaaaaaaaaaaaaaaactttacccttttgctagtatgttgggcttctgggttccttttccctgagcccaatcctaaaccaactagttttaaggtttgggaaattaactctttctagtttgaaggatgcatctgaggggaccttcccatagtacagagacacaattacctatcagtgaagagaggacagatgagaagaaaggaaaataagagggcaccttttaaaggagtcccagggattcaggatgcatttgaaaggggtacagactaaagatgaatggctacccatctagaatgaggggagcaggcatgcctggttttcttctcttcctagcagatacgtggggtacatgagggagagagggaagaatgtcctctttccctcttccatccttgcatccccaagtcacagcgaccttggcagctgccgccatgagtgccaaagtgactttcacccataaaacaggaaggacctagagaataggaattatccactctcacctatgcctctatcctccaaactgtcagtagctttggagttccctacacctcatttatgccatggatattaatgtggccttcatccatgaaacaggaagctaggggttggcttaatcagcaggaatcagccacacatgctcacctgcactgtaccttttaacttccattattgtctgcctctggatccctaagatccatttttctatcctagggctttgaccagaagcttagaattgagtctgggatgaaaatttgtcttgagggagttgcatggactccttatcataagctgaatgctaagttaaaactgtggaactgagtcctcctccaacaagggaggggaaaggatgtcttgtgagacacccagataactggtagctatagttatgcttgctaagatttgggtgcatggtacttggctttggttagctttcttggtcttactttcccaaaaaggaaacctccgagtggtgggtatcctatttatcccaactgcctggcaggatttgcaggataattgctcagaactagaatattgatccagatttctacattacccatcccttttgttctttctgagctgcagctggagactgctggttggttcacaggaacaagcagggttagcctaaaatgtaagcgaaaacttaaaaacaactagtgagtttagaatttaatgacaaatatatgatacgttttgaaacatgatttctctctctccagtcctcatttttattaaaaaacaaatcatcataggactgagtggtttgcaaaatagactttacttttatacttggcctgattatttgcaaaaatacagcaagtataattatttttacataggttttttggattggctttgatggaactctgttccccaaggaatctcagataagatcttttaaagctgagcccagccatgggtttatcctcaaatacctgtaagttgagtgatcctctcctcttaaggtcccataataaacttggagctcctagatctgttagaaagtgacattctttactgaccacaggtcaggaaccctgtacaggaactgtgtagacaagggtatgaggcaactgggcttctatcatccctgcaagttgagattgactccttaaagggaagcatacccttccagtctaagccttggtaaaacaaccactttctccaattgtgtcctgccacaaaagaaaaatggattcttattccactgatgcaaacggctatattaccataagttgaggatactcactgagagtttccaaattctataggaaccaggaagagagaaacaaacgtgctacaaattttgttcataggagtataccttactcaattattaaaggccgtaaaaggttcaaaataaatttcttcgactatgaaaacccaaacaaggatcagcaatattccaaccaaaagtcaaataagttgcttcagctttctgagttcagtccatttagttaactcttgttttgcttgatattcgtgaatgtttcagcttttcatgagtcctgtactattttcctttattccaaaggttacaatttctaaagctatcataaacctatatttcagagcacctgttacagttctatagcttattagaaaccatcttttgaaaaggattaaaataggacaacaattgtctgtgaatagcaaaatgtccagggtaattacagttagaaacacaattgacaaaaaagtttggttatctccctaatggtttacagtaacttaaaatagcaactaaggactaagctctgatttttatcttgcccagattcctttctaaggagtctggggagtcatgccctacaaaccataaattctcatcagatgggttttatttaaccctgtatattgtgacttactttccaatctgactgtggcataacaaggaagaaaattacaatgttttaccccaaagtatatttccttgccataccttgaaattgccctgcaaaatctcttgtgggaaaagtccacattctatagaaaattctttctcctttgttttctttcctttgtttccagatccaagagataatcaactaacagccaggtacccttttaggtctgataaacattttacaactctgcaatctgagagattcctctgcacaataaaacttggtctccacaatcctttatcttagcctgaacattcttttccattgatcccaggtcttcagataaactcaaccaattgtcaaccagaaaatgtttaaatttacctatagtctggaagcaccacccccgccccccactttaagttgtcccacctttctgaaccaaaccaatgtatttcttaaatgtatttgattgatgtctcatgcctctctaaaaatatataaaaccaagctgtacccctaccaccttgggcacatgttctcaagacctcctgagggctgtgtcacaggccacggtcactcatatttggctgagaataaatctctgaaaatattttatggaatttgactcttttcatcgacagtagtttcaattatgtgttataatagtaattcctagcatctttaactttaagataaaacttggtaagttgctttgtgtgctaactgcagccaaggtttgctttcttcattaagggcctggttattccatatgtccccaggccttaatagttgtgaagccagcaagtcaaatagttctcaaaacccaaaaagcagtttgtaaccttaaaacacttagcaaaccttgcatctgatctgcagtttaccaataatctctaaggcttttttaatttctcaaagattaaagtcatgtgaactaaaaggtactacagattttatattccctttaaaaaatatttgatctaagcacttgtctttctttaggccaaattaattagagctcttttgacaggcattaaacacagtacatagacatgcagaagaaaacccagtcgctgggtggggccctttaaaggacaggcctgggaaaacatgcagatatcaaaccagaaagaaacttattccctaaggcaggattgctaaacaaagccttgccaagcagttacaggccatgcccccaggatgtaaaacaagatgaggcttgcagcacaaaccacacagacatgcaaagcacaccagattggccacagcccaagactagccccacaaatcctgtttcacaattaagctttacagaaaaaataaacagtgatggttgggggatctggcctagcaaagggggaaaatatctttaaggcttaactgctgatggagtggagaggaggaaagaaaaaacattttttaatgcttgaggaagaacctcttattcttatacaactgattcctccaccagggagaaaagattaagcttaattactgtccaaaagagttaaacccgttagccagggaagaggaaggctgtggcagcagtctgtggctgggaaccagtcagctggctgtgggggacttttgagccatgcgtcctagcactgcgtagggtgtggggatcggcatggagctgctgctcaccagtctgtcctgaaaaaggaaaaaaaaggccatgaaaagtctcccgaccccaaggagcgacagagggtggtggggtggtttcccataagctcagaagtccaaggacgaaaaggcttagaaagccacagtgagaggttttgtgttctcatttcactcaccacttcttgagctcccacattgaacaccaaaaatgtcgcaggacttttccttagtgcagctaaagatggtgttctttgtcccatggccatgaaaattcaggcttgcagacaatttgaatggtgagtaagacagggttttattgggtgaaaaggaaggaaaggcagaaacagggactctgtctaggccagagtccctgctagagcacttcccgccagactgttcaaatctcatgttccacacaggaagaggaagggccagggtcctccccactgcaaagagtgtgagcttcccaaggctccacctcagtgggcgggctggttggagtttctccagggaccccctcccacttggctgtctcgttaatattttttgggtgaatgacatttttctatttaatattatatctgtgagatttatctagttgttgcatgtatcaatagttcattcttttttatggctatacagtttttcattgtatatgccacaatttaattatcttgctccttcttgttgataaacattttggttgtttctggttttagactattatgtgtaacgctgccattaatattcttgtctaaaagggccatctacacttattttttggtactcctttctcctggttcattgaattttcaagtcatacagttcatatatatttagctttagtaaatactgccaaacagttttctaaagtgtactaatttccattctcataagcaatgtagaagaggttttgttgctccacatcctcatcaacgcttgactgccatgaatattcttgcctaaaagggccattacacccattttggggcactcctttctcttgcttcattgaattttcaagtcatacagttcatatatatttagctttagtaaatactgccaaacaggccgggcgcggtggctcacgcctgtaatcccagcactttgggaggccgaggcgggtggatcatgaggtcaggagatcgagaccatcctggctaacaaggtgaaaccccgtctctactaaaaatacaaaaaattagccgggcgcggtggcgggtgcctgtagtcccagctactctggaggctgaggcaggagaatggcgtgaacccgggaggcggagcttgcagtgagccgagattgcgccactgcagtccgcagtccggcctgggcgacagagcgagactccgtctcaaaaaaaaaaaaaaaaaaaaaaaaaaatactgccaaacagttttctgaagtgtactaatttccactcctacaagcaatgtagaatagtttttgttgctccatatcctcatcaacacttggcatcttcagtgctttaattttagccatttagtgatatctcactgtggtttcactttgcatttccttgataactaatgatgttgagcaccttctcatatgtgggttgaacatttggatattctcttttttgaagtgtttaaatctttttgcacatttttagaataagattttcaagctttttttgttattgatttctgagagttcattgtatattctagaaatgatactttattgcatatttggactggaggtaacttctcctaatttatggcttgactttttactcttttagtgttgccttttgagtaaagatgttaattttaatgaagttcaacttagcaatctcttcttttgtgattaatggtttctgtgttcttttcaagacatctttgctatcccaagttcatgaagactttgttgtcttgtggatgctttactgttttacctttcatatttatttctatgattatctttagttagtttttgtgcatggtgtgaaataaggttcaacattcagtgtttttctgtatggatattctgttgacccagcaccgtttagtaaaatgaccatccatttcccactgaatcaagtggcctttctgtggtaaataaggagaccatacgttttgggttatgtttgtgtttttccatatgtgtaccaaccccacagtataaaaaaatttatatctgatagtttaaagttctctagcttattcttctttaattttgccttttactattttagcttgttttctgtagtttcatgtaaatttgagaatcagcttgtcagttttacacacacacacacacacacacacacacaccccatactgttgggattttaattggcattgctctgaatctagagataaaaccaagaactaacatcttaacaattttaagtcttgcattctaagcattttgtttatcccttcagttatttaggtctttaatttctctcaggcatgttttatagattttagtgttcagatcttgaatgaggtgcttgggttttataaaagtgactattaatccgaatcattaattggtaatgtttacaaaatctctaataattttactattatttagagcctgcaattgtattaagagttctgagatagcaattttccatattagctaagtaatatctaaaagtactcagtgctataatttcacttactttacaaattgtgttcaaaatgttttttgcagtatatttgcttcttatttttaaatttgattaagtggtagcattatttagaatctgatttattttctggttaaatatattaagatgataccctctcaccatgcctgaggtctgtgatatatttgttaaatgaagggggaactggtgaatcggcaatttcaatttggttttaagtagtttatctcctctctatattaaaaacttcttagttattaaacccaaacatcaattttagacatagagaattaaagttgtgattgcatgatgccaaaatatttaatcaatttagtttaaaatgttaaactaatggtcttaactgtccagttgtacagttatcttggcacaattcaaaaattggctgtaattttgtctgaattaactgaattagcctgattcaatttaaacatgtcctaagacgttgaaaaattggtgtgtgcatatccattactgtattagtgtgtagtggtagtattaaacatgtacattcactgagttgagactatcttttatttctttgaatatcactaagtgctgtagcacataagtacactttctcaatgattttatttctttttttaaaattataggccacttttgtatggtagagatctttgctttttaaattttattttagtaacttccatatatgttgcctttagtttttaaagtttcatatcagccaacaccaaaacttgaattaaagttgtgataaaatatagtagtagttcacttgttttactattgtactttgaatacgaaagtttaacgatgttaaaactagcttatttccaaatgtcaaggatacataaagtgttcaaataatagttataataataatggctaacactaacaagtattcactgtgaaccaagcagtgttcttagcactctacataagtaaccacatgtaaccctcacaaaaacactgaggtggttaatgttcttatcctcattttacagaaatttaataaatggtttaatttatttccattttatcttaagtttctgattgtactgtgtaattaaaattcatacataatgcaaatcctctatgctttttttctttttaaatagaagagtcatgccctatcctgagaatagagggacatcagctgacatatgacaacataaacaaacttgaagtttcaggtaggcaatataatcctttgcaaagtaatattttatgtaaaattatcaccaaatgctagatatggaatacattataggtgaatctttgatactgcaatttaagatcatagcattaacgtgaaaattttaagaattctttttaatttttttttttttttttgagacagggtctcactctgtcactcaggctggagtgcagtggtgtgatctcagcttgctgcaacctccacctcctgggtacgagcaattctcctgcctcagcctcccaagtagctgggactacaggcacatggctattttttgtatttttggtagagatggggttttaccatgttagccaggctggtctcgagctcctggcctcaagtgatccatctgccttggcctcccacagtgctgggattgcaggcgtgagccaccatgcccgacccataaaaatttaaggtagatgatgtagaaaaaattccgaaagcagggttctatatgtttaatctgtgatcaacaatacctcaacctcttggagaaaaaaaaacttatttaaaattataaaagtgtccattgtagaaattttggaagaagaaaaaaaaatttgtgagaaggaagatgtcaccacccagataaagacaagattaccattttggtaatccttgttatctttccttttggtaatctttcttatctttctttctccttcttttcctcctccttctcttctctctctcccacataaatgctaatgagtgtgtgacacacacacagttataattcttatattacatttcatgtgtatgcatttcctgtcatcaatacacatttctttaaagcataattttgtaaaaggctgcttagatttaaactgaatggctgtactatttttaatctaattttctaactttagacatgagagctgctgcaatgagttactctaatttttacttaagataattcctaggtcaaaggaaattaaaattgagtttttttgaaatatattcatgatttttttctagaaaaatggctacacgttctatatgcaaagtgaatttcattctcttttaccctaaaaggagaaaaataaaatcaagaaattttgctgatcccaagcagcaagatttcgtttgaagtgaatcaattaatagataagggcaacacaaaattctgtttagaaattaacatttctattagtttattaaattgaatcatctgttacattttacaggttttgatctaggagacagcttttctctaagacgtgcattttgtgaaagtgataaaacctgtttcaaattgggaagtgcacttcttattagagacactatgtaagtaaaaaattattttctttatgtttaataatacttcataaattattttctaaagagatttcaaataatttgttttaaaaataaagtttctcaatagcatcatcctcactggaatgcagtggtaaacgtgttgttaatgtatttgttgtttataaaaatcattgcaatctaatcttggctctacagtgtaaatatcatttatatgtacagaaaaaggcacgatcattagagaacagtaattaaatccatttctgaagaaatattgtttatgtttaaagtagacataaccaatattaggtttttcaaggtaaacattaaaacataaggcactatatagattcagagccaaaagactgatatttattgtataaatttttagattttctatgcttcttaagttaaaataaaagaatttagctcttaggtgttcatcttatctattgtatagagtacatagtaaataaaaagctgttttgtgcttttatttttggtcttgatactcatttaattttaaaatagatttaccaaagttttcccttactttttctttcttttttctacagatacacttagagttacaaaaaaaaaatcactttccattcaaatagtgacaattggtcagcaaccatacagggcaacaatgatttaccatatagttggcaataattaaaggatgacttcatagtaattcagaaagctgagttatcaggcaggcaggtagcacatatggtcaggataattattcctggagtccaagatgaatattcgcatgtatgaatataccgcaataaaaaccctcaaaattctacttagcttcatatgcaacacaaatgtttttgtgtgaaaatatgtatgtatgttttcccttcctgggcagtagcctaatatttaagacagacaagattgtggagaatctcaaaatttgaattcttaaagggaaatagcattaatcatctcattgcccttgctcagacgttctgtgtaaatgaggttcataacctacactttttccctgagaaaagtttcttttaaacctattttgtgatacttttggtaattttcatttaatgactgaaatggctccttaaaagtaaactgctcaatacttggtaagaaacaagaatattaaggaaggaatttcaaatcaggggatataatgggtggttgttaggtgggacacttcagcagatgtaactgtatggacccacgctacagctgccgctgtttgggtggtctcataagtaggcattaaattctcagggtacagcagttccatgcttaggtatgcataagccataaagaaaagatgagaggcgcaatatttctcacatgtatatatttagatgtttcttaactaggagtagataactttaattaataaatttaagaaaggcaatacattctgtttaaaaattaagatgcattttctctccccatcttctttcggatttaaacccctgtaatgctggccagatggcaaaaggattttggcaaaaggagtgaaaccttttaaaattcattggattacatgtgagaagacttagctaattttacgtagctacactggaaaacttgctgcgacatttagacaatgctatttctttttaaatttatgtgattataaatattaggcaagacttggaatttgttttctgaattttgggttctaaatcactgcccaatccatgggtaatcaatgtaagtgaattctctggttctgtggagcagaacctggtacctccactataggaaaccgggggtatctggttgagctgcccagtgagtatcaagtagcttggctcatttccacttacatttcacttgttgagccaagtatgctaggatgcttctcttgcatgatgccattttgatttttcaatgagactggagtaaagttgtagctatttatatatttgtaaataagctgctttgcagagtcagcatgggaaaaggcagattctattttatatggaaaatggggatgctttctgtgcctgagcttccttttattgttctggcatatcccaggtgaggttcgtgagaggagagacctaatgagtatgttggtctgatacctgttaggcatattcaatgccttgagccttgcttaatgtaaaactcccaaagaccgcttttgcaggggccttccagatagacatctgtcaggtccacaacccaggtactaacaagggtaaatcgtgagtctcaggcaaaatacaagtcaccttttatctctggataacaacgcagtaaccaagagcttctgccctgggcaatagtatcacaccttatcagttgcccatggttcttttgggtcctgtacctgtgctaaagttatagggaagcttatgagaggccacacagacagcatatatgttccctggaggagggtcccttccctggccattcccctaccaacggttaattgtggaggccacactttaaatttccaaggagtaacttggaaattatactgcactctcacgccagggggccacaatagccaaccatctacggtgaggggcttggagggtccatggccaacaccaggtttttttgttattgttcccctacttttaggggtgttggggcaggcaataacagattactgttcatccccgtacctggctggagaaggtcatccttcctgtcatagatctggccacatggcctggccctacatgggtcagtgactaactagctaattctataactttcaggtaatgaaccacaaggtttagccttgataaactgcccagcatcggttcagattaccacaggtgtcacctctttggtgatcactatctacactgccttgagttcaacttattaactactttatctacacctggttttaaaccatatgttgtcagtgttaggctggactgcggcagcaatcaaggcagcagcagtcctctggctagacctatctgtataccatgccccatcaggagtggtgggggtgcctcaggctccatggccttatcttgcattaggcctataggcttcaagacctcttgtaaatctgtgctaagggacttgtactcagcatacttcactgctgcaagtaggggccccacttcgctaaagtggatgtctgcaccttccctatccagggggttgttacccatgaatgtacctaccacactgttgggtacactctgcatgatgactatatcccaatctgccatgcttttatgagcctgaagggcagcatacgcacttactaactgcttcccagtccggggggttgttatccataaatgcacccatcctgctattactaactgcttttctatcaaggaataccagagctcagctcccttccatagctgggaccaaaagcctactgatattctcaggtgctccgtgcactgccataggccctaactgaaactatctgtggtcacatgcacatctagcttaaatgggcacctcttgtcaactacctgtagggcttatgcctgctaattagcctgcttggctaccaggaagactgtctcagcagcatcataccaatcctaggcaaggggagcattgccgcttctaaatctgcaagagaatcagaggttaacataacatcattaataagatcatgacacatggtggggctatgtatatagccccgcagcaacactgtgaaagtccattgtcaacctcccatcaaggcaaactgatggccttctgcctccttgagggctgccatagcagtagtcacttcatgtaggcagtgccccacatatggggtgagaacagcagctagagagccaaaatcactcgggggcactgagcccagcacaagatccctcatgtgggagggaaagcgttcatcatctggcccccaggtattcagatcaaatggtctgctctatacccatcttccagagtatttgcacaaaatgagtatatgatcgccatttactcacagtttctagtatctctccagcatcattccaaacagtccatattgctgccattagccactcgattaatgtgtgttcaccatgcccttgtgccaaccatcggcacagatacagccactgacgaagggaggggtgagttgtgataaaagccagcttttccatctcagaggtggagcaagaaatgctgccagcctccttgtcccaaagacagagtggccaggcagggaggggcactgggtgctgctgacactgttacctaactctcacaactcagtgggtgtataagcactataagaggtgtgttccactactgtggggggttccagggctctccactgggttcccatcagatggtcatgttgtaccttttgacagatcatagggtgagcctgcagtggtggagccccctcctcctcaggatcagaccaaatgggactgtccagcctggaggacaggctcaaggtcacacttacagctgttgctaactcttgttccaggctgtttatctgggcctccaagtgccctgcttgcacctgaaggtccctcacccccggttctgctacaagctgtgcacttgggtccctaggcacacggcttgtgctgggatgtcccttacctgtggcactgagcatgtatttcacacagtgcagtcagaaatgcccatccaactctgctggtggaggtgcgttccttctcggtgctgcgtgcttccagctgcctcggtgctttctccacactcacaggagacctatccactgcctcccacatttccattggggcccatccaagcagcaccactgacaccaggtaccacagcccatgctgcagccacagagccaacccgggagccttcaggggccaaagacccactcaccttatcctgccaactatgccaattgtcaggtccatgactacgccagatgttatgctggggtcaggttccagctcatgctgagatctgaagggagtgggtgggtgagcagagagctaaaagaacacttggagggctgtaggcaggtgaaaggtagttttattcagcagctctctcaacagcagcttacacacactaggtctctcaaactgttcgctctgtcttggctgcttcatccggtggctcccacacacagctacatggacagctctcccttcagggtcagcagcttaactgtttctctctctgggcatgagtgagctgagccgtgtcctggctccccgctgttcatctgcaaagatggacagctttgactctctgtttctctgggcgcaagtgcacttgtacagtgtcagcagggcaattatacctttcacagacaatagtggcgtagggccaagggatggccttcccatgttatggctacatggttttgataacaagaggagttatacgcctgtgctctaaactcactgagtcactctggatgtttacctcggcctatccttgaccaaagcacagccgtgttccttacaacatcattgtacacttagaggtggcacaggctcaggggatatttgaggggctttatgtgttttgttggctttaaattcatgtccattcttcagtatttatgggatagcaaatggtaagtatttgggggctttagaagattctgggtggcatgctacctagttctctagaattatttgtttagaggaaattttcttggcttcttatatctccaagtatccctagttatttaaaagagataattcattatttgtatacatattgagagctatagcaaagaagattatattttgattattttaaaattgtgttttggcagttatcaggggaaattggtaaaatactgagtaaaaacagataaaaacacacacaaacacacatactatagagtaccttattttcttggcataatgtagtctctatctagcttccattagttgcttcaatagaaaattcaaataaaatgtcttagtattgaatattttagatgaatgttgaatttctacatgctgttggttctgaaggagcaacacactcagcttgactggccgatgaagaaattgatttcaaatgtaccaaggaagtgagttttctgattcattgtttaattcaagtatggtaaagagccttatcccttaggctcttgatagctactggctgtctggaatgctatgttgagaaggattctggagccatagtgggtttaaagtgctgtgacccattaaaaaaaagagggagggaggagtgagcatatgtgttccatatctatagcctctctgaattaggatgatttctgtaagctggtggcttttgcaattgaagcagtgtctaagaatgaggggaaatgaggctacgtgtgaaaaaataacacagattaaatttaatacgatttatgagcttgaataatatagctagacacagtgacataaatgacatatatgatccccttagtatttgttacaaataaataaatctctagtgaaagggagtcttctttatctgtgtctctgtatctctctcattcaattggtgtctactttatgaaagtaaagataatttagtttcatagctttatgtgaaaataagaggtagctggtaggagctattctaaattatgtttatggatttacaaacataataatctttagcaagtaggaaacccaaactacaaatttggaagatgtgtaatgtttttcagaaatatttgaactctggactttaacagttcccttgaaaataatccaaaatatggacaaaactgtcatatgtgttgtaacatgatgtttaccttgtcttttctattgttgaatgatttatcccatgggactaccttttctacacggacctttacactatcttcagattattattattattatttttttttttttttttttttgagacggagtctccaaaaaaacagagtctccagctctgttgcccaggctggagtgcagtggcaccatctcggctcactgcaacctccacctcccggtttcaaacgattctcctgcctcagcctcctgagtagctgggattacaggtgcgtgccaccactcctggctaatttttgtatttttagtagagacagggtttcaccatgtcagccaggctggtctcaaactcctgacctcaggtgatccacccgcctcggccccccaaagtgctgggattacaggcatgagccactgcgcccggctgatttttatcattataaataacactacaacatacaagaaagttgtttttttctgtatttaggattattttcatacaattgacttttagaaataaaattacttgttcatatttagggatcttgatatatactactaattatgttcaatcattgttttctccatgtattctgcatattttccaatatcttctgtagcactaggaattatcatgttaagattttgtgttttatttaacttaaaacttgtgcagttacaaatagaagctgtagtttactgtataattttcacagaagttcctaaaatgtttctgttttgctaaagggtgaataagaggtagcattcggtaagtcactgaaatgaatgcagtctagtctagagcttatccttttactcagcaagcatttgttgagtgtcaccatgggccaggcactttgctaggttctgagcttacattgataaaagaatgtggatctagtctttccttcctggaacctgctagaaagatacacagtgcaaggaaaagctacacttcccccttgctttgccttcatagaaggcaactgagatgtattgccttctattgttcaagcttagactgcatgactcaaatttcaccccttataaaggctaaacttccttaagcatcatgcacaaggctaattttcaatgttttcattccttgcctcttaagggactattttgagggactattttgtaatgcatagttctcctttgagtcctctccaagttctcaaaacaaattcagaggctgaaaacttgttcagaactctgatatcgaagtgtctccttgctgagtgttttagaaggattactttacaattccattaagctctagagaatgcctatttatgcatcccttgggttttcatttggggcattccttcattgtgtagataggaattttcctatataaggataggtgacttagttacaaagttgtccagctgtttttatgagattgtatgactgttatacatgattatgtcatcactgtatttccttcattgcagtttggcataccaagaatctgaggttagtcattaagtcatactttttttaaatggaaagaacatatacaaatatttactactcaatagtcaaaagcacctattttattttttctagaaaattcagaattgttaataggcagcaataaatttcttagtatagaaatagctattaagatgtaatgtaatatgaaatattattagttcagtattgttatttactgattttggaaacatttgatgttatcattatcaaatttaagtaagttgtgattttgctctttcagatttcatataactcagtattgggaaaagtagaacatatcagtaattaatcatatgtgtataaattctacaacattcatatgacttaaagttttttcttggacttgaccattcatttattagccagagagaaataagtttgtttaaaaggtacagaaatgttttaagtttaatgtctatttgtggacattagtagataaaatcttataaaattaaaatatttttgtgtttcacatgagttaaaatggaaaaaccataaatctatttatacatttaagaaactaaagttcctatagtaagaaacaataatgtcactattattgccttcaaagaatgtattcttaacaattaaattacccaaaaaagcctcacataaaatggaatgaaagtgagaagctgcaattcatttacaaacttatccattttctagcctcaaatgtacataaactttctaaggaaaagagggtaggttctcatttctgaggaaaaaaggagtagtttttcacttgtcttgttgaaacacaggacagaacattagtaaagagtttgcagaaagaggtataagatacggttcttgcctctagggagtgtgtgatatctctcctcttaggggcaagaaatgaagacagacttaattataattataattataagcatacagttaatgctttaaatgttcaacggaacaaatataaagacaaaatctcttatatttgggatgataaaaaaatatcttgaagactatgggatttaaactaggctttgaaaactgaagagactactgagagtcagagatgaatcaagttctggggagaagaaagacatctaaggtgagggaaggccctaggaggttaagacatggaaaaatacaataaatataattacatgagataatttctatatgagtaaaacattgacaacccaatttatccatatccaaggtggcaggcagtttgattttctctgatgctcacaaacattacataagcccctggcaaaaattttgaagaactgatatacgattttccccaccacatccagatggcttaagttctaatgaaagtctacggtcattcaaaataggtaataggcctctcatatggtatcatataatcggaaaggtattatttttctttagactccattgctcacatcagaactcccattctttggccaggcaggaaattgttcagatatataagccttacagggtagagattacatccaactgattcatgtttgtgtccctcgtggtacctgacacacagtggtgtttagtgctagttgaattggtatgatcttaagtttaaattgaagggatatttgaaatttattggtacagctacttgcatattttaggcaaccaataatttcttttcaccagcacctcaaaaaataaggcaccttacttctaattcttgtactagatcttttcaccaaagaagacttaagaacaaggcacatgtgactacccagtttccaacaatgataatgattcttataataccaccttacatttatgaatgttatatgatttacaaagtaattttgccttcttgtatcaatggtaccacaatgacttctgtgatgtagtactttatcaccattttatagatgaaaaatgaggttgaatgacattaaggaattcacctaaaatttcaaaaataataaacagttgtgtctagaactcagttcttctgtctccaaatccagaattaatttctactttattatgactaattacatgtaaattatcttgttatgtctatatgccatttactttgatagtagtgaggtactagctaaatgtactacttaggagtcataataaagcaaatgttctcataaagtaatgaaactaaagtgttctattttgataattacttgggccagtctaataggcattgattaatctacctctattgttggattatatattagatttttttctttttccagtcattcttttatcctatgaatcaatcttgtaagggacagcagagcttttcgcctggtagggttgtgtgaatgtatctgtgcagtgtacactgcagattttcagagtgtacaaaagaaaggcatgtaagcatgtacttcagtcttatctttaatcttaatttggctcataaaaatgctatttgaggactaattagttattatccttaggtggttgcaaatgcgttgatttataatggttgtaaacctacaaataagcatggtcttaaatttatgaattagagaattgacctttaatagtgcttgatgctttgttatactagtgcttcagcatagctttataacaactctaaagatttttctgtaggctgattggactctgtgtatcacaaaatagcatcaaatagtctaatcctccttctcagacacagtcagactgtaggatataattataatttcaataataaactttgaaatctatgtcaaccaaggaagaataattgtgccaactgataaatcattactttattgtcatttcaattctttcaacttagccacaaatgctaattagaaaataaacatggtagcagaaaaactatgcttatgttattttatgtgattcctgtaagtttcctacatcttgttcattatctcatttaggtcagcacttatgtttcctaagacacttttttttcccccaaattaggtgacattttaataattttagactaaagtaataaaatattcaaataattgacttgattaattcctttcaccctggctatatctaagtaatttggaaacatcataagttcagtgaaaatgttaatatgaacacatgtggtgatgccatgcagaattaacatctggctggttgaatttgagactgagttgaccagatgttttgtgttcaagttatttttcttatttgaacaatctcaacttcttctctctacttcataatttcttaatttcagctgttctccctggaggcaaccccccttctttcaaaggttaaccccttcacttgtgctcttaatcctctcctagccagcctcctctaagaccttgatccacccatgatccccctgctcttgggtcttcagtgctcctctccacagtatcctggcctcttactctacaaatatatacttaatccttccctattacagaaacattttccctgggcagtcccctttactcacagacttcttaaaggaacaatgttactgtccacttttacttcttcacacatcccttagcccattaaaatctgactaggacttcttgaacactatggaaatttctgcctcatagttgccggtgacagctgtcctaattccaatgccagcgttgacctaggtgttgcactaaacttcctttgttaacccatttctgtctctctctgtcataccatgcccaccttttctgcccattggaatcctacatatcctagaaagcttagtacacatgctacattctacactaagccctcactaatgtccttcaagtttccttctttttttggtggtccaataccactttttccataattcttacataattctgatctcattctgacttgtgtaatctaaatgttctcaggcctcgttaatatgtggatttaaatgatattatattaacatcaatgcgtaaattgatattacttctactttctacatacatcactgcttaaaacctactgttgttatttctgggagcccgaaaagtgatgcacatgtgttcatgttcaaaagcagatatgcttttcttcttgttttctaattttcttatcaatgcgtgttgctattgccattgctgggagctctctccatgcaaatgctactctgtgagacccaaccaacctctgctcatggctgctcattcttggcccacaggtgccagaattaccctgtggcttatgactgtgtgaggtgtgcatgtgtgctttggaaggtggtggcagagatctaaagaccccttctctaactgtcccctgggccctgaggcagtgtatcttgggcacagagcctcacagagtgtttaataaatatagtcctatcaactcctggctcaccatcatttgtgagtctcaaaagccagtagaggccaggcacggtggctcacaccagtaatcctagcactttgggaggccaaggcaggcagatcgcttgagcccaggagttcgagatcagcttgagtaacatagcaaaaccctgtctctacaaaatacaaaaaagttagccaggtatggtggtgtatgcctgtagtcatagctactcaggagcctcaggtgggaggattgcttgagcccagggaggttgaggctgcagtgagccctgatcatgccactacactccagcctgagtgacagagtgagaccctgtctcaaaaaattaaaaaataaaaagtatgaatacgaggcaattctctctgttatcctcaagtttgcctctctcttctgatttacccacaataagaatgtaaagtttcttttggttaagagggctatattgagaaaaaatattttatgttatattgtcattattatttctaccttcagctttgatgccagtgaaagaataaatactaacaaagtatttcattcaattcccaaatgatagtaaatattatatgctaaaccctgagaatttaagggtgaatagaaacagtcccctccattgaattatttctgtttggaaggacaggccaaaaataagctgttatggcatataatagcaatttttagatatatgtatgataaactctgagagaacagatgaagccaggaaaagcttcatagaggaagtgaaaagttgagccttgaagtgtgaatttaccaggtgagccaaggggtcaatgtatgttgtggtagttagagggagcatcatggtagttttaaaggtcaaagcaatttgaggaatagtgagaaatcccatgtggttaatgaacacaggtgagaagaatgtctggaggtagagaagacttgaaagtgtgggctgttctgaaaggtcttacttgctggcatgaggggtttgaactttattcatattttaaaaaaaagtggaggtgtagtagcaatagcactacatgctagaaaaaaacagctgagcgcatatgccattgggaaaatctcagctttcaattaggtctaggacctcccaggctgatcctaaagcaacagttgagctctcggacccaaggatacttcagaatttagaggaccttttgcgggcagggttgggtttaatccagggttaaaaaaaaaaaaaccctttcctggctgagggacaccagaaaaaactaaccttcaatgtatcctcatttctaaagagcagactgtctaatttatccttggtttttgttatctggatggcatccagtagggggacttgttttcaatgggaagtcgtttacaatgccacattgaactagtgctaatcagatcaggcgtgagattgttagagggtcatccaagctttgttttcccattaacaacctatctgcctgaatcccctcagcaaacacaaaagggctaagatttcagagtctctgtggctgtggaactccaacatcatcaaccagcctgggaggaaggcatttcagacaaaccctctaggccctgctagccaaattgcttgtaactgacaggtgatggtgggtgtcagctgggaaagaaatgacttactataaactccaagcatctctcacttcactctcaggaaatgtaacttgtatcatatttctcttcctggaagatattcagcaagtcagaggcctcactgatacttgtaaatacggaagttcttcctaaaccctgcctcacacttactcggaatggcagaattaatttggaagccagttcttgatatttaaaaatcgatttttttccatttagccatttaattttataagcaaaattaaataaataaagcttggtcttgttaaacaaataaataaagcttagtcttttaaatatgatctggaaaattcactctagctctatcaaaatagcactttgctttcaaggcttatgctttgagctggttgaagaattacctccggaaccactgtaatcagtaattaaactttttaaacactttgctatgtgaatgtatctcacactcaatttttagaacatcatttatgaaatgaaatttctctagaataacaatgtcatcttgcttttcagttcatgagcactgaaattataaaagtttcttcatcttttttttatattttagttcttgtctcacattccttattatttatttaagcaaaagatcaaacaggaaactggtaatcatgaattttcttcctaatcctttcttgttctgtagcttggtttatcctttcctttttgtatatttgaaaccgaactgttactacacagagacgtaaccatattacaaactgtggttcttttaggaacactgaacaaaaacatcaaatttggacttgctatacaatgaaattgctaattacttaatatactaataagtaaacaaatttatgagcttcattattgtctttaagtttcttgacaacaacccaccagggcctagtcatggagaacaaatgcaacctactgtctgcttctatctccccataaaacaactgtcaataaatatgagcatgtactttaaaatagtgaattaattttaaaattttctgcttttccccaactttgtcatacttacaatgctaaccattggaagggagtctgaaaagcaaagtttatcctcttaaggcagtttttattggcttctcattaattggacagccgggaatgctcattatttgttcagttgataccctctgttgctgggagaccagatacttcaccttcattaagttaactttgtagataacaatggcaggccctgatttcacaattcagggaatgaatagaatgaaagtttactgtgtgccaggaaaaccataatgtaggattggtgcaaaagtttctctttctttccatcatcatttgagatagtcacatgatcattattttcacgtttgaataaattacttatcttttagttacgttaccattctactgttgttcttcccaaagtatgaaaatcccaatgtattacttttcattaggaaaataaatacagaggtactatttatcagaacacgttttacctttcttcacattacctagttactagtatacatactgttctcatgattttcactactacttcctgaaaattacactcatctcatctttttttttttttttttttttttagacagagtcttgctgtcgcccaggctggagtgcagtggcgcgatctcagctcactgcaagctctgcctcccaggttcacgccattctcctgcctcagcctcccaagtagctgggactacaggcatctgccaccatgcctggctaattttttgtattattagtagagatggggtttcaccgtgttagccaggatggtcttgatctcctgaccttgtgatctgcccgcctcggcctcccaaagtgcagggattacaggcgggagccaccgcgcccagctttaaattacactcatctttaaggaaatgcttggtgaaccatggcacatgtttacctatgtaacaaaactgtgcatgctgcacatgtaccccaggacttaaaataaaaatgaaaattaaaaagaaaagaaatgtttggtgaaaacttctaagttttctagaaaatgatctaaggaattagagagaaaatattcctgattttttttcatcttgtttagcatggctatcttttccaaaatccaataggcagtaatttctattttgaagtcataactgtgtgttttgtgatacttcctgatctatgctcaaaatatcattagaggaaggaactataataatttacctttcagggctactagccacgtaggatgtgcaaatgtcagaataaatactttgcttggagcccaaaatatgattcattgttgttgttaatattatagtgtgattgtaaacattttatttattcatttcttgaaattaatatatttacttatatccctccttaatacttatgaaaatagagacatttttcccctcatagtgccaaaatattacttttaagtcaggttggtaatgatgaggggaattttattcttaaccaaaaaagaaagctcaaaaagatacaagcaacttgatacattggaagaaactaaccttggaattaaaagtcataagttcaagttccaacctgacctctggcagagtaaaggtgaggtagttatttaacgtctgcagctttaatttctcatttatgaagtgagatgattgatctaaattactatcaaagtccctttcagctttaggagtatagaactacaggaaactatgatgtgtggtttcttatgaccaacacatttccaaggacttgaagacttctatgaagacacttttggtgaaatattggagcagctattatattttgcttcagcctgtagagattttaaacttctttttgaaattaagaaactgatgtgtttgttaaggacttctttttctatcaaagtttttgattaacctgctttagaatcacataggatttgacttttccatctgttgttttcctgatgaatgtgatatagcacagtctcataaggcctccacgttaaggccttatgcaagataacatagattttatgctgagcaacgtaagtgttaagcacttactaggactggttataggcatcattgtggattttcatgaatggaacaaatctttatggatgcttcctatatgcaaggtactagtctagatgcttgatttacagccacaagtcttacaggaccctgtttttgtggaaatcacattccacaaaacgggcaataaatatgtaaaccaataattcttaaaaagtcaggtaggcacaaacctatgaagaaaacagaacaaggtaatgtgttagatggtgactagggtgaggacaatcttagaccgttcaagggaagtgatatttgagctgagacctgaacagtaaggaaaagccatctaaatcaagggtgtcgaatcttttggcttccctgagccactttggaagaagaagaattgtcttggaccacacatgaaatatactaacagtaatgatagctgatgagctaaaaaaaaatcacaaaaaaatctcataatgttttaagaaagtttacaactttgtgtttgggctgcttcaaagccatcctgagctgcatgtggccagtgggcggtgagttgagtaatcttgatgtaaatgaagacctctgggaaagactgtcccaggagaggaaacaggaagtacaaaggcccaaggtctcaatgagcctagtgtgttcaaggaacaaaactcaagtcattgtgcctggagcctgggtgccacacagagactggaataggagatgatgtgtcagaggaaggcaggagtcagatcacatcataccttatgagtcatggtcagagaaatgcatcttattctaggaaccatgcaacacttttagaaggttataagtaagggagggacctggtctgattttaaaagctcattctagctgctatgtgcaggccagactgtaaggaaaggcaaagaaggaggacaatcaggacactataacaggagtcctggggagagatggtggccgcttgggatagcatggtgatagtggagatggagagaagtagccagagtcaagatctgttttggtgataaaaacagtaagggcttggggtggtggctcatgcctgtaatcccagaacttggggaggccaatgcagatgtatcgcttgaggccaggagtttgagacccgcctaggaaacatggcgaaattccatctctacaaaaaaataaaaaatacaaaaaattagccaggtatggctgcacgtgcctatggtcccagctacataggaggctgaagtgggaggatcacttgagcctgggaggttgaggctgcaatgaaccatgaccacacctctgcactcctgcctgggtgacagagtgagaccctgccgcaaaaaaataaacccataaaataaaacacaaaaaccagtaagacttgctgatgggttagataggatgggggataataaaggaaaggcaggaaaaaataataacttgcagggatttgggtggggcacctgagtgaatagccatgtcttttattgagatgtggaatccttgtggagggatgttctgacgcagcaatataaaacgttcaatttcagttatttaattacaatgcctttcccctccacgtggagatgcctactaaggacttaggtatgtaagtccagagcacaggagagagaaatagacaaggtttatcttggttgcatctcacatcccctcctttttggaactttcctcccaaactcccactgccttaaggtgacacatttgctgcccaagactcagcatctcatctctgtctgtctaactcaggagagcttccttctctggatttgttctctctctgtgtcttccctcttagaactttgcttcatagcagtccccacagatctctgctctgtgctttccaaggtgagaattaattattacatagtttgttagtaatgtgtgaccgactttttgggactatcttaatattaacagagcttgtgttttataaacacgaggattttccagacaggaagaaagctctaaaagtagataattaggtgttttggcttgttaatgaaagcacttcatagttaggaagaatgttgaatgtacaatctatttaataacaattatacaaatatagagtgatcaaatgcttcctctatctcatgccaagatcttttctgtaatacagaaaacttttaggttttattctgtttgtatttcctaatggttttaagtaaattttgaccagaaaaaaaattttcattaatcagataggaaaaaatctagagaatgaagttaatatggaatttggacaaatataattcattcttaaagtcctatacagtggaattgcttcagagttaataaaatgttattttttatccaactccatgtatattactactagtaactttgtaattagatattccattttaagtaaatgggtgaaatattgtcataggtatgtttttatttgaaagttttttgttttgctttttctcctaatgcttcagtgatttacttattataaaggctataggttgggagttctagacttttgcaacttaatttttacctaccaaaatagaaaaaataatatttgttagtgcccttttaggtgtgtgagggggtgcagtatgtgccaattctccctcatctctgtccttgaagaatatagggataatttataggtcacatcagaggttagggttatttttcccaagatgggaatagttgtaatttttaaaaacctgatcatcagcacaattcatgccccttgcaaaaactgagaaagtagagaaaatataaagaaaaaaataaaaatctttcttaatcttaacaccaagaaagaaacattttaatgttaagatttttatgaaataaatgttttattagggtcaaagcctcactggcagtggttctgacacctggacactgcttgtactatagttagtcatttttaaggagcgctatttctgatcccctggtcacttccccgaagtttcatatggttttcttccattttatgattaaacagggggctgctgtacatagagaatgtcagagagcagatgcaagctacattttatatttctgcaacattgaagtgaattacaagtttaaaggaatccaagatatatgaattacaaggcttcagagatactccagattacatctagagctggctccctccctcagaggccagtgtgaagtggactcccaggcagcaattttcccttgacatgcctggagcacttcgaccaactttagtttgactgtatgatgtttagttagccatattttgaaaatattgattttatattgaacattttgttaatctgatatacttgtgccctcataggcccatgaatatctagatgaccttaattaatgtgtagaaaagtagacaatttaaaaaaaggataaattacacttaaatttcactgagtctaggctcttcaaatgtaggttagtattaatttatgtggataaaatttttatttatgacattgaactacatacaacatgtataaaatggagggaaggcaggaaacatcccattgagaatttctagtcatatatatatattcatctatatattcatatgtatattcatatgtatattcatatatatattcatatgtatattcatatgtatattcatatatatattcatatgtatattcatatatatgatatatatcatatatacatatgatatatacatgatatatatgatatatatgatatattcatgatatatcatatattcatatatatcatatatactcatatatatcatatattcatatatatcatatatattcggatatatatcatatatattcatatatatatcatatatattcatatnnnnnnnnnnnnnnnnnnnnnnnnnnnnnnnnnnnnnnnnnnnnnnnnnnnnnnnnnnnnnnnnnnnnnnnnnnnnnnnnnnnnnnnnnnnnnnnnnnnnnnnnnnnnnnnnnnnnnnnnnnnnnnnnnnnnnnnnnnnnnnnnnnnnnnnnnnnnnnnnnnnnnnnnnnnntcatatattcatcatacatatatatcacatatgtatcacatatatatcacatatgtatcacgtatatattcatatacgtatcacatatattcatatatatatcacatatattcatatataatatatccatatgtattatatatccatatatgtcatatatcatatcatatatcatatatatcatatatcatatatcatatatatcatatatcatatatcatataatcatatatcatatatctatatatatcatatatcataatcatatatatcatatatatcatatatatcatatatatcatatatcatatatatcatatatcatatatatcatatatatcatatatatcatatatcatatatatcatatatattcatatattcatatatattcatatatattcatatattcatatatattcatatatattcatatgtatattcatatatattcatgtatattcatatatattcatatatatattcgtatatattcatatatattcgcacatagattcgtatatgtatatagattcgtatacgtatatagattcgtatatattcgtatatagattcgtatatattcgtatgtagattcgtatatattcgtatgtagattcgtatatattcgtatgtagattcgtatatattcgtatgtagattcgtatatgtatattcgtatgtagattcgtatatgtatattcgtatgtagattcgtatatgtatattcgtatgtagattcgtatatatattcgtatgtagattcgtatatatatttatatgaatgaacttagcaagtaaggatcagcgatatttttcttactgggagtatcactgaataagcaatggataggatttcttataggaaattacactccattcaaaatattcaagcatggatatcttagacatagcaagctgtcattatatctctctggtaacccaatatggcctcttttataacagaaattttggcaagacccagagaaactattctgtgtcacgttaagtgtttgtgcttgtgtggtataaacaacaagcatagtttgtaagagtagatttttttttaatattttatttttaaaatgcagaagtttttcttcaaatagcataatcttggcaagcaaaatcatatttggtcttgaaagcacaatataaatttctgaaagggaaatatagtaattataaagattttcattcattataaacttagattaaaatcaattattccttaaatatagctaaatttatttcaatgtatattttaaaatataattgttatatataaatattgataatactcttatttttttgtcacagcagaaactactcatgagatgcaaaaatattttcagcttttgaactagattataaattatcgaaaaataattctatttaggttttttttttttttttttttgatatggagtcttactctgtcacccaggctggaatgcagtggtgcaatctcggctcactgcaaccttcacctcctgggttcaaacaattctcctgcctcagccaactgagtagctgggattacaggcgcgtgccaccatgcctgactaatttttgtatttttagtagaaatggggtttcactatgttggccaggcaggtctcaaactcctgacctcaagtgatctgcccgcctcggcctcccaaagtgctggaattactggtgtgagccaccacacccgacctctatttagtttttgtttattaaacatcaaagtatcatatcaaaattcagtacatctctgtctttcatttgctggatcactcactcattcaacagataaagtgccctgttgggactgcacttaggctttgtgagtgatacaaagtatgttaaatgctgtgcttgctttcaaagagctttcagtcttaacaacagatggactggtgactgcatgactatcatcctaagtagaaaatgaagagaaaaaatgtttttattatcttttgctttgtaagaaaccactacaaaacttagtggctaaaaataacaatttgttatttctgaaggatttcagaaaacctactcctcaaaaaaagcaataagaacacaggcaaaatttgtcaaaatcaatatattcagaactttttaaggggctttcacaatctaatgagtgattattcaagaaaaactttgaatctcagtaagactagcaggctttatggcattttaacttgtcctattcatatccctctctctccaacacatggtaggcttgaaaaccagtagcttcagaatcacagtgaaaactagctgcctagcagctgctggaaagggaagaaagagtgtgaagttcattaaaagctccattttcagggaattgccattatttttcctgcctggtagttccctaaaaaccccaattcttagttggtctttatttgacctgatcagagcttgtaagaatagccctttcctgtggacattaattgaaaataatcagtggcaattgtttaatattgcagctgcctgaggcaggagttataactggaataaacaagaagctgatcaaaaaaatttttaaagaaaaaactggggaagaagacatccatagagggcactagaaagctccaacatatttgtaggactccagacacatatttctatgttacagggctgtgtgaaaactccggaaaggcctgaaaaggccttaaaatctttggcaaaactccaagctctgaacaagcagaacatgaaggctaaggtgatttataaactaccagcctgaacatttaaggtattttctgtcacacacataggccttcagcaaaggctgggatgcttttgggtaagggtgtttaactattcaatcattagttgactactaagctaaatgagcagaaacttcaggagtcaaacactttacagaatttgtccagaaaagtgactaagcaaataaaaagcagcaacaataaagacaacagacagcaccaacggcaaaccattgacaggtagagtctaatttccaatgttaccatattatattattttaaatgtcttcttttctttcttcttttaaattatactttaagttctagggtacatgtgcacaatgtgcaggtttgttacatatgtatacatgtgccatgttggtgagctgcacccattaactcgtcatttacattaggtacatctcctaatgctatccctcccccttccccccaccccatgacaggccccggtgtgtgatgttctccttcctgtgtccaagtgttctcattgttcaattcccgcctatgagtgagaatatgcagtgtttttgttttttgttcttgtgatagttgggctgggaatggtggtttccagcttcatccatgtccctacaaaggacatgaactcgtcattttttatggctgcatagtattccatggtgtatatgtgccacattttcttaatccagtctatcattgatggacacgtgggttggttccaagtctttgctattgtgaatagtgccgcaataaacatatgtgtgcatgtgactttatagcagaatgatttataatcctttgggtatatctgggtcaaatggtatttctagttctagatccctgaggaatcgccacactctcttccacaatggttgaactagttcacagtcccaccaacagtgtaaaagtgttcctatttctccacatcctctccagcacctgttgtttcctgactttttaatgattgccattctaactggtgtgagatggtatctcattgtggttttgatttgcatttctctgatggccagtgatgatgagcattttttcatgtgtctgttggccgcataaatgtcttcttttgagaagtgtctgttcacatcctttgcccactttttgatggggttgtttgctttttcttgtaaatttgtttgagttctttgtagattctggatattagccctttgttagatgagtagattgcaaaaattttctctgattctgtaggttgcctgttcactctgatggtagtttcttttgctgtgcagaagttctttagtttaattagatcccatttgtcaattttggcttttgttgccattgcttttggtgttttagacatgaagtctttgcccaagcctatgtcctgaatggtattgcctaggtttttttctagggtttttatggtttgaggtctaacatttaagtctttaatccatcttgaattaatttttgtataaggtgtaaggaagggatccagtttcagctttctacatatggcaagccagtattcccagcaccatttgttaaatagggtatcctttccccattgcttgtttttgtcaggtttctcaaagatcagatgtttgtagatgtgtggtattatttctgagggctctgttctgttccattggtctatatctctgttttgataccagtaccatgctgttttggttactgtagccttgtagtatagtttgaagtcaggtagtgtgatgcctccagcttttttcttttggcttaggattgacttggcaatgcgggctcttttttggttccatatgaactttaaagtagttttttccaattctgtgaagaaagtcattggtagcttgataaggatggcattgaatctataaattatcttgggcagtatggccattttcatgatattggttcttcctatccatgggcatggaatgttcttccatttgtttgtatcctcttttatttcattgagcagtggtttgtagttctccttgaagaggtccttcacatcccttgtaagttggatttctaggtattttattctctttgaagtaattgcaaatgggagttcactcatgatttggctctctgtttgtttgttattggtgtataagaatgcttgtgatttttgcacattgattttgtatcctgagactttgctgaagttgcttatcagctgaaggagattttgggctgagacgatggggttttctaaatatacaatcatgtcatctgcaaacagggacaatttgacttcctcttttcctaattgaataccctttatttctttctcctgcatgattgccctggccagaacttccaacactatgttgaataggagtggtgagagagggcatccctgtcttgtgccagttttcaaagggaatgcctccagtttttgccccttcagtattttattggctgtggtcttttcaattaacaattagaagatatgcaaaaagaaggtatgcaaaactatgtacagataaaagagtggccaatagaaactgtttctgaggaaacctagacattaaacttacttaacaataactttgtctgctattttaaatatacttaagtaactaaaggaaactgtaatgaactaaagaaaagtatgagaatgatgtcttaccaaatagagaatatcaataagtagaaattattaagaagcagcaaatcaaatttttgaatagaaaagtataaaacagaaatgaaaaatttacaggaggggttcaagaactgatctgaggtaggagaagaaagaatccaggaacttgaagatagttcaattagtctgcagatcgggggaaaaagaatgaagaaaaatgaacagttccaagactgtgtgataccagcaagcatgcataataggaattctaggagtggagagagagtaaagaaagactatttgaagaaataagcaatgcaaattcctcaaatttggtaaaaggtattaacttatacattcaggaagctcaacagactctaagaaggacaaactgaaagagatccacacttagtcacatgataaccaaactgccaaaagtcaaagagagaatttttacagcagcaagagagaagtagttaaccaaaacagaaaacaagaagttctcaatatgagtaagctgacttctcatcagaaaccatggagaccagaaggcagtgggatgacatagtcaacgttttgaaggaaaaagactgtaaatcaagaattctatatccagcaaaactatccttcaaaactgaaggtgaaattaaggattaaaaaaacccagaatttgagactagcacatctgccctataagaaataggaaggaaattcctttaggctgaatgaaaggaaactagacagtaactcaaatccaaacaatgacataaaaagcactggaatagttaattacatagataaatataaaagccagaataaatgtacttagtttgtgtttcttttattttcttatcagatttaaaatacagttgtataaatacatacatacataaagcaatattagaaatcttcattgatgggaatataaaatataaagatgtgatttatttgtatgacaatagcacaaagcaagaaaaagctaacaggtatatagaagcaaagtgaaaaataaagctaaaatatccatgttatatttagcatggtcttcagttgggactaagaaatcagtattaggaactcatttgcaagaatttaatatgaaaaagtttctttggaaaatatttgtttacttattactggtgttctttaaaattctctgtacctctctctactaacaaaatcaagtcataccattttatttccttgataaatctctactgtttgtcagactgcagtgaattctgagattttcttctgttcaatatcttgttgaataaggaaatgtcacaatttaatactgtaatctcttcactcatttttatacactccaaactttaacaacactgtaccagaagattttttaaaaggaaagagaaaagtgcataagttacacatttactgagaaaaatatgactgagatattgtgttacacagaactttatacctagattttattttcttgcaatctccagtttccccacaaaagttctttgttttcctcccacagtaagatatttcccaaaggccttcctgaggagtactcagtagctgccatgtttcgagtacgaagaaacgccaaaaaggaacggtggtttctgtggcaggttttaaaccagcagaatattccacaggtaaagtaccattagagttgtgctcattagttttccttgtgtaattaagccaggtgaattatttgaactggtgcacaaatttgcgagtagatctagtatccaaatgttctatcctttagagggatcatcaacaagaaaatgcaagtattctcgtagttaggatggccttgctgagatccataatatgagagtatagtggtaaacatagtgttagtttttgtttttattttacttctaggtccatattttgtttaaagatgtaaaactgccttctctttacaactgcttcattaactaattctttctaagtaacacattcttcatcttccttctgtcgtctctaatgttatatattatttttaaagcagtttatcatttcattggacaactcttggtgaataaagagttgagacttaaatatttatcccatcaataaaaatttatggaacacatactatatactaggtagtgacaagaaaagagatctgaaaaacagaatttgtattatcagggagcataaggcgtaaggagatgacatctaggagaacaacataatatagcataattatgttgaacaagtgcagtggtagagttaagcttagtgttgggtgtggacaatgggagcaccgaaagggcagctcatcggaattgggggatggagagagcaggaatctaggagagcatatagaagagatggcgtttgggctgcaaagaaggaatgctggcactccagcgaggggagaggaacctcaaaattacttgttggcaccatacattagtttttacttgtgtacatatccgttgaaatgttttaaatcatcactgatcttttaatctgttaatacagctacaattttatgatgagtagatcaaccaagagtatgtcctctataaaatgtgttttctctgtaccttgcaaagtatcaatggtgaaagaattgatcttagcttccctacttagggaaatgatcacattcttagtcttcttaaattggtaaccttaaattcctgtgttactaatacagagcaataatttatatatcttataaaattttatctatagtgtatataaattatgtatatataaacttataaatggtttatataaacatttaaaataactacacacacacacacacacacacacactcttagatgttctcttaggaaggagcatattacattcaccagaatgccccatttctaaaccatttttgtagtggtgtttgctgttcttttattttaacaaacctggtggacacaagtgtcatctaaaatattttactaagtgcctcagttatactaatatgcatcttgagcttttctttgtgtgctttaataattttgaacattgatttttaaaacatttaaagatactttacatttttgcagatttctatagtagttgatggtggaaagaaggtggtggaatttatgtttcaagccacagagggagatgtgttgaactacatttttagaaatcgagaactccgtcctttgtttgatcgtcagtggcacaaacttggcattagtatacaatcccaggtcatttcactttatatggattgtaatttaattgcgaggaggcagactgatgaaaaggacactgtggatttccatggacggacagttattgctacgcgagcttcagatggcaagcctgtggatgtaagttgtgatgttagttgtgaaagagaactaaaatttctaagtaaaaaaaaaatcttattaaaaacattcttcttttattactgtgtaatagattcccttctcatcaattttattaatttaattaatttgccgtcagatgtgtgaagaacagctatgttatttccaattgtattttcacatgtattattttcactccattttatacccattttctccagcctgggaatttaaaataattaggtcatgccttaaaaaattagattattaaaagtaaaaattgaaaatatgatacaaaatataaacttggtctaagttcatatgttttaaatagaaagggctggaaaaagctgaagttcaaattaaatggttccaggttatctgctattttcattcaagaacaatagactattcatccttacaatagcaattactttgtattgcagactattttttataagcgtataatggtttttcagggttctattgtacagaaaaattcactaaatgtattagtaggtcatttgaaagagaaaaattgcctagtaaaacccttttggataaaaagttactttaaatattacatttgaagctaacatgatatagatttattattgatttccctagagaacaaggtctgtaatcttaaaaaagttagatatatctaaatttgatggctgcacgttttcttagtttattatgtataaacagtttatagtttatttcttagagtttttgcaagaatgagatccagtcttggacctcaatctaagaagattgagtgttctatgtcctgtgtctcattaacttctcacccaaggatagaattgatcccgggctaggcgcagtggctcatgcctgtaatcccagcactttgggaggccgaggtgggcagatgacgaggtcaggagatcgagaccatcctggctaacatggtgaaaccctgtctctactaaaaatacaaaaaattagccagatgtggtggcacacgcctgtaatcccagctactcgggaggctgaggcaggagggggaggttacaatgagccaagatcatgccactgcactccagcttgagcgacagagcaagactttgtctcaaaaaacaaaaaacaaacaaacaaacaaaagaattgatcccacaatttgaggctaaagaatatcacgtgaatccttataaaaaggatataggtaaaaaccgtggtattacagtggtttcataatttcatgtggattcttggttcatttgaggataaacttgaaggcatgtcacaatgatgcaatatttttggagatagtcactgtttgagttaaacaaacaaaatacatatttttataaaagattcttggttctactgaaactttgaatggattaatttttcatcatctctgtacaagctctgtgattcataagatctgttatggtgtgaaaatgtgtttatttgggctgtgtgttattgaaaaaaattatcatgatttagttttatttcacctatcccacctgtgtatttttgtgagaaagtgacaaaactgatatgaagatttttttttaaatcaactcagcattttgacaagcatcagtacagatttagccttaagcattctccttctaaagcactatatcagtgaagcattctaaagtaatgaatgaataaacaaagcataaactattctgactgtcatttcaatgtcatggaactcaatcaggttgtaatcctttgaaaattgatcatctatctttagttaagtaaaacaattcataagcaggacctggtacaatggatggtacataataggatttcaatatttattgactattttgataacagtgataataaaaaagtttagttaagaacaatattaattaactagagttctcattcttcattctaaataattcatatgttactgctggtatttcattatactatgtaagacggtgtatttaaattttataaataaaaattaaccttaataaccttgcaaaaagttacagaacataaatcattacatttcatttagtctcatgattttgcattttctgcaaatcttaggctgctcatgaatctgtaagatgtctggagttgttaacgcattctatgaactgcattgattttgttcatctgaggcgaaaagtaaaagttatagatttttcccccctttttgcttttaaagttggagtagagattcacctctaatcacaaatgcctgctttctattattataagattaattattataagattagagttgggtctttctgtataaagtacttattgacctcaaaataatgcattatttaatacatttcagtgcttaaagaattcaaacagcctatttaagaatttattatattgctattttatcaataatcagtactatttactttttcttaggtgttgatttcatcttgcatttaaaggcatgattttactttccttgaactacagttaatttcatgtccaaatgccaaaaaaagagaaatctgctaagcaaatagaaggaatcaattatttttgtaaaaaggttgttagccctgcttagattataccaatataatataaaatcaataggttttaggcagaattcgtgaaatatagataaaaaattttttttccttgttggtaagtgaacacctatttcagtgcctcaaataggagtctggaagtacaaataaagcctttctcatcatgtgctcatatctttgattttaccttttctccaattttttttttattttgaaatggcctcattttgtgggcattctttactgtagtgtaaaacaatagcttttttaaaattaagtacttctattttattgtttgaaacagctagccaaggtttgcaattgctttcattacctgatttcctttatctatagatccatctctatatccaactctatgtctctcaagtagtccacaaaacaatgaatcctacatttaataaaaacattaaaatatccaccagtaatttatttatattagcttcctttttctttctgattaaattactgtagttcttaactgcctgaatgtgattccaaaaaactaaagatgtttcttattactaattttttcatagattgaacttcaccaacttaaaatctactgcagtgcaaacctcatagctcaagaaacatgttgtgaaatatcagatactaaggtaagttaattttctttgcatatgaagaatgaagaacgccaattatcttttagtggcatagtttgtagagtccaaatgtagggtagcactgagtgtgttctgttgaagccaggtgggtaatttattcctagtaaggaagcattcatagtgctttctcatggttactttcaacagttttaatcccagcatttcacccttaattttgagggtaatatatactcactttgaactcagtataacttaaagttatgcctttcttcctaaactatgttctgacagcagcatcatttccagttacagaagttttaaatctgtgatcatactttattctcactcattttccttttctaccctgtcacccatcctggctagctttcctttgacatagacttttcatccttatcttccattttcctgttactgccaaagtgtacatttacctcgtgtctgggatatcaatcattattggatcaactgccttccctatgtcctgcccctttgctttgcagcataaccagaataagtctgagtcactgctttgtatattcattcactctcttccagcaaacactttattcagaaacactgaccttctaaacactgtgctaaggaacagggctaacaaacatgattaaggcacattccctgccctctcttcatgtctttctcttaagtgactcctgttggaagtgaaatataaatgcagtttctcagcctctcattctaaatattcccaacctaaccatacaactgttacttacttataccaatctttcattacaagaaaaatactaaattcaatactttctgtatctctcagtgtaatggccgtgtgtgctatcttatattactaggtgtaactatatttgtttttaaattgatttaagtacaattcagactcagtaagggaagttttaccttgataaacttttttattcctaatgcttcatttggaaaaagtagacaatcattgtttgatttattgacttaccaattactaaaaaagataaatgggacagaaagatattcaaaggggactggttctaaaaaaaagtacagaaagagcatatgaaaagtgcaagtaaaaggtgaaaatgtcttttctttggatcttagatttcataaatgttctatacttgccatagaaaattatatgaaaattttatcaacaatttatgattcaaaaatatttttgacttttgtagctcactttgggtagtgaaataagaatgtgaccaaagcatagcttaaagcatagctttagtgacttaaagcatagctaagtctttcaagtattatatgttttgcttttgtaacttggctttataaagcatatctccaatccacttcatgtatctcattccaagtaaaatgccagccagccaaatatctttctataaatatctgaaaagataatttagaatgccaatctacagacttgaaatacctagacttcctggagctacacatttaaatcttaaagatgttaattcccccaaaattttgtttttaattatgcttttttgatgtcagagtttttaaagtaataactttctctggttgtaaagtaatataatgatattttgatatatctgaatattatataattagccagtaatcactgccctttatcattatattaatgtaatagaaactttccacctgatttatgaggaaattgtttaagaagtataggtgatgaattgggtggaatggttggtaattcaaagcagtgacatgatctcacacattatgaacaaaagatttttaaatcatattttgaaaagattatttgggagttagttttaaagaatagaacacaaggtaggaatttatctctgactatggaaaaaataaggaaagactgtatttttgctgacaattatttggaggggatatcaccattcatttaatgactaacaaaaaatagaaacatactacattttatgaataggaatgtacagttggaaggataaataattatataaaagccatttaaatgcatctgctctacttccaatacgaattgtatttattttcttttttgttgcaaaatgttttgaactcagaaatttttaatgtagttgcttaaatatctaattttgtcctggaatttcaaatcacacatgttttctggttgtcaatattttataaagcatttcaaaggcaacattttttaaagatcacctataaagatgcttctttgtttctattggattttcagtttctaaagtagttaagtttcatgactctagatataaaaagaatgaagaacaaatattaagagaaggatgaaatcagtaacatttgttgaaaataaatgagaaatgtggttaaatttttaagggctaatactgaatatgtgtcaaatcaaaaccagaggttttacgaggagaagagtccttacttgtatgtttggtgttgcctctaggcactttttgtggagtgtggacaggtttatggtgaagcctgagacatacttttaaagttatttaaatcctcaatttaatatagtgactcagttatccagagcagaattgtgaattctaagtgggtcttggttatctgactggaaagccatgaggtaagaactggctgaaacatcatatcaaatcaaatgagatgaatgaactgttttggtaataaccttgttccattcaaatatacaatagtttttagactttcaaatttgggaacttgttaggataaataatcctgaaatctggagagagtagatttgaaagaactagtggtggatacagtaaactagttgctgtatttctgggtgttggttttgttacagtttttattgtaattatcaaagaattcaactactaccaagtttttttttttatttcttatttccaacttttattttaagttcaggggtacatttgcaggatgtgcaggtttgttacataggtaaacgtgtgccatgatggtttcctgcacagatcatcaaaatgaatttttgttacaaaacttatctatgtttactggaaaatatagccaaatccataaaagaaaataaatatcaatcatgatttcaaccacagtagaaaaccacagataatattttagttttgtatcctgaaaatactttaccatgcatttataatttgtggtatacaaagtaatgtattaactctctcctagtgctttctcttcgtgaaattgcaaattcagagtggaaaactatggtgagaagtctggtacatgatgttgagaaaaaacaatgtgtttatcctcctcagattctccatttgggttaattttttaaaaaatgttcgttgctttgtaaccaaattgcacttcactttgtccagcatgctctgaacccactggataagtataaaatgcactacttgtctgttgtagtggagacctttttaatatctttaaggaacagtagactagaacaaagtatactttgatttaataaatgttgtctaagagtgtaaaaagaatttattttctactttatatgctttaataatcatcttgttgaaggaaaccatattttataggttcaaattacatgtttcaactttaatttttgttcccaaaagatgtattcacatgttgtttgtacaaattattttattgcaacaatacaattattataaatgtatgaaatttctgtacttatcaaaaagttacctaatgtaactttgtaattccttaccaagaccattattttaaatatttttcttgcatgttgtcagtataagaaaacccatgggctcaggcggaaagtgcaaaagtgtgataaacattctcacactggtgttaacttttggttagtaagaagcagttcttgcaggcaacctcagcaatccctagtttagtgggagccagtgtttggaacatgagaatgtttggaattgaccccatttcctaaagcctctttttggattttagtgcccagagcaggatggctttggaaatattgcatcatcatgggtaactgctcatgccagtaaaatgtcttcatatctgccagcaaagcaggaacttaaagaccagtgccagtgcattccaaacaaggtatgctagttttaattggtgcacactgaaagccactccagactatgagcccagctccttgaatgtggcctctgttcacagaatgtgtcttgccattcagtgtttgttgaagtaaatacctcagttactggggtgggttaagaaaaaggcattgaagataggacttcctggattcttacctggatagtttcaagcccatctgaacttccttccagggtgtgaactagaatgaatagaaaagtgaagggaggaactacctgtacaacaggcaagtactgagtacttagcatgtgccaggaataggctgaagttctgggaattcacagttgaagaaaacacagtgcctgctcttcaaaaacatacacaaaaatactctacattgtatttctttttctgtatagactgtgtttttccagcatccctaaattttcaactggctgtctccatccaccataagttattaggggaatatacagaggggctctgttgttactcaaataatttgtttcatctgcaccaatatgatcccctggtcaagaaggctgtgccatggacctttatgaacttcctttatggatgttaatggcagtaataaagcctgtgctaaaaggctgagtggtgtcttggtggctttttccagtgcccatacctgaggaaaggagaacttgccccagtttctagagcagagtgtgccctagcactgtgacttaaaacatgtcatcgacttactcatccaccaccacttcaactcctggctgagccagatggggatggggtgaaagtttaagggaaactttcattttttctagtggccaatattgcatagtaagctctacgagaaaggcaaggttcgggggtccatagagaaacagcttgtgttccagctcatggaaggtctggaggagatgatgctaaatggtgtttggaagagtgaggaacagtgaatggaattccattggcatgccctttttcccttgttcacgtggctcactattcctcactctaagcatcagctcagaggagaacaaagcgttatcttgctagtgccagcttcacatttataaaccatttggctttagatcaatgtgacagaatgtttgctaacacagatatgcatttttgctcagggagaagcaggattaccaggagctccgggttcacctgggcagaaagggcataaaggagagccggtaagaaaaaaacaaatactgatggagaaaacagggttttgttaaaaaatgacttaaaaatgtgttcatctcatttttctttattctgtacaaatatatgtttctataaaaggctatcaaagactatattaaaatgctgattactgaaatagagactatcagcattctagtcagcttttgaattcatattggtaggctggtgtgaactttggaaagatctggaactgcaagtctttgtacctataagctctagcaaaactgtgaagcagaaaagtctattttctagctgtgccctagccttctttagcattcccttccccaaatccctgttgaattcttgcttctcttgtcttttgatacatccccaccagagatttttctgtagctctctaccttttttttttaaacggccaactttttttgaatactttctgtgtatgaggtatgttgcttggtgttgtagagcacataaagacaaataggatatattccctgttctcaatgattttacatctagaaagagatcgtggaaaattacaaggccatatgtgttaggtgctgtaggagagttgcaagtgtcctggagaaatgatctggggagctagggaggatttaatggaggaatggccagtggactggacctctaagtgtgtaattctaggctatatcccatgcttagagatttgtctttcccttctcccatgactcaaaacttaactgtaatgtttctgactcttttgagtatatcttttgtcagctaatcaggtaaatgaatgagcactgttagaagttgattctgtttttattatctctccaaggtaaaatagattttaattcctttcctgccttaacttgggaagtccatgattctaaattatttgtataatctattgctccccccgctttaaaaagacaggagacggaagtctgagaaatgactgatccctcaaagcttcaacaaagctaaagtcatttgattcctgaaggaatgtattcccatgtaccttgcatgggaacttctgacaactcagcaggtgtttgaaaaagatttttgaggagggacaggccatttattattgctctttaaaatgcattgcttggggtacctttactttcaatatcattttatgaaaattcaaaataattgaacaatatctgattctaaagaccacttcaatcaaactaaacatacaaatcattataccaatagcaagtatttgtttcatggttacatgtaccagacactgagaagaatgttttagatatgttatcatacttgatccttacactcactcttcatgttagggattagtattagcattttacagatggaaaaactgaagcttaggggggttaaattattgcccagtgccacatagcttgtggccaaactgggatctgaaaccagtaggtctgttgactactcatgaccagtatccatttttaaggctgccactatgttctaaaagcaattcagtattatgtatctgtgttctttgatcaggtacttccacttgcgatattttactcttaaaacatcatttaaagatgccagcctagtgtctctatcctcattttacagctgagagccacacataggtaaattgatgtgcccaaggtaacacaattaagaggactcagaaagtggaaagatctctgagttaatcccaactcttctctggttagagggtgaatttggccaagccactcagactctccatacataagttttcttatctgcaacggaaggtgttctcacttatctgttatacctatactataaagtgacaccaaaatgccttgaaaaaaatgcatgtggcttaatttttggtgactgtgatttatacacgttcacatacacatttcttaacttgtcttttcacttctttgatttatcagttccttcatatttaagattgctggcacaggaagaaatttcatgtgttgcttttaggaaaaataccctgcccactgaaaaaaaaaaatctatgtcataagtacagtcctatttgaataattattttaaaaatcgttaaatctactttaaattcttttttaaagattaagtgcttagtcactgttgttagagcctataccttttaaggatgcattttccccctcgattccctttaatcataaatagacatctctcactttaacatttaaatatttatttttctttattcattcatccatcaacacctatttattgagctcctgctattataataaaaaatgtgccagactttggagccttagcagtaataataaaatacagggcctgctctcaccgagtttacaatcttgtgacagtttgttcacagaacattctctccttctatagaaactaaaaccagtagaaaagaactaggaaaaattaataaaaatggataaatattagccaatttattgtatgtcaaatctataaaatatacaaaaatgtatcttagagtaacaatgcattatatgacttctcatctgcagtatgttttaagaatattaacatttgttttaaattccatgataattcataatggcaagagattttagtggcaacgtaaaaacagctgcaataaaggaaatttataatctacacaacgaataactaatctgtgtatttcccttatcttttcaatacatgcacccacatttgcttaaaccaacatatgctctgccttgtaaaaatgacattagatgaccatgaccatgaatgcattcaaccttcctggcacttgaaataaacatggatgtattgtttcattttaaggaatggagggtgggtttatttctgctcctattgcactatgtgatcttgcaactttaatgtgcaataaataaagaaggctttccttcatttttgattctggcatgtaattgtcattattagagcaggtgcacaaaataatgcctacataacttgaagatcgaaagtcatttttgctctaaggcatattcagtagtaaattttgtgaaatgatcagaagtgcaatgttactaagggaatcagatgttgttctaaaggttttctttttgatctgtaagcccaagaaggaatatttagaggaggtagaacagtatgttggaaagagtaccactttggagcctgaaccacttaggattgaatcctctccacctcttacttgctttgaaaattatccttaataatacctagccagtggttgattgtgaagaaggaatacaatacaatatatacacagcacttagaaactggcatattatagatattcaacaaatatatgtttcccctgctttcttatccaccatataattgtccatatattgaaggagaggtggagataactattttaggttgagtttaatttcatttgtggcttgatgaagaacaaaggaatcttcatttgtgagatactgccttagaattttcaatttattagatgtaaaaatgttgagttatcatcacatgctacttgtggtaaatagtaataattgatcaatagttgatttcttcaaaagattactcaataagttgactatttcattcaactctgtatcttttatttccaatattatctgtatctgaccttctctggatacaatgtgctagttgctttttttttttttttttagacagagacttgctctgtcacccaggctggagtgcaatggtgcaatccctgttccctgcaacatccgcctcccgggttcaagcgattctcctgcctcagcctcctgagtagttgagattacaggcacccgccatcatgcctggctaatttttgtattttttggtagagatggggtttcaccatgttgaccaggctggtctcgaactcctgacctcaggtcatccacccacctcagcctcccaaagggctaggattacaggtgtgagccactgctctcagcacaatgtgctagtttttcaaatatgttccttgcattgttttacttagataatgtcgattagaagccatccagacacaattataacttactttttctcattaactgtataatattagtcttttggtgcattttacttttggcccaatgtaataaagtgagaaaagatttgagaatacaacttccacatctctttcaaattatatgtcactacattacagtatttctaaaggtgttaagatttttattaatatgttaattgacataacaattatacgtatttatggagtaaagtgtgatattttcattcatttatacaatctgtactaatcaaattgggataattaacatgtccatcacctcaaatattcattatttctttgtattgggaacattcaagattttctcttttagctatttgaaaatattcaataaattattgttaaccatagtcaccctacagtgctattgaacagaagagcttatttattctttatagctgtaattttgtatctgttaaccaacttctccctatccccactcccacccttcccagccccagtaaccattattctactctctacttctatgagattaactttttaaacttctacatataaaggagaacatgcagtatttatccttctgtgcctggcttatttcacttacaacaatgtcattctgactcatccatgttgctgcaaatgatgggattttactcttttttatggcttaatgtcattccattgtgtgtatgtgtgtgtgtgtgtgtgtgtgtgtgtgtgtgataaaacattttctttatccatttattaattgatagacacccattttgattccatgtattagcgattgtgagtagtgctgtaataaacacaggctttcagttatcttttcaccatacttatttcctttcctttggatacatatccccagtgggatttctggatcacatggtagttccatttttagttttttgaggcatttccatactgttctccataatagctatactaatttacattcccactaaaagggtgcaaaagttcccctttctccacaactttggtagcattttttttggtcatttagataatagccattctaaactagggtaagatgatatctcattttgattccaatttgctcctccctcatgattaatgttgagcattttttgatgtatttcttggccatttgtatgtcttcttttgagaagtgtctattcagatcattcacccattttaaaatcagattattggggtttttgtttgtttgttgctgttgagttgcttgagctccttgtatattgtggatattaatcccttgtcagatgaataccttgcaaacgtttactcccattctgcaggttgtctcttcattctcttgatggtttcctttgctgtacaaaagctttttattgcaatatggtcccatttgtctatttttgctttggttgcctgtgctcttgaggttgtagccacaaaatctttgcctagactaatgtaccaaagcattttccatacattttcccccagaagattcatagttttgggctctacatttaagttttcaatccattttgggttgatttttgcatatggtgagagataaggatctagtttattcttttgaatatagtttttccaacactgtttaacaaaaagactgtcctttcctcaatgcacgttcctggcacctctgtcaaaaatcagttggttgtaaatacatggatttatttatgggttctctagtgtgttccattggtctgtgtgactgttgatgacaatctaaggtgttatgctttgagcatccttactttaatgcagcaaattcatagagaaaaatgttactcttatttatacacatacattatgagttagacaattattccgaatagtcatgtaagcaaatcctgtcccacctgagccaaaacccactaatgacttcttgtctctcttaaggtaaaccccaaagctctaaccatgggctatgaggcttcacataatgtgtagagctctcccctacctgactcctcaatcccagattgtctcgtaccctcttcccttgttcacttttgctccaagtcctttgtaccagttatgtatgcctgaagtgtccttgtccacatccacttggctcgctctcttcttcacatcatttaggcccttgctcaaaaataactttaaaataaaaaggccttctggcatctctatataaaaagcatccttactcccacctctatcctcttactttgcttagcacttttactgccacctgacacattgtcatcacgcatctatttctttccctgttggaaaatgagttctgtgagcctatacatagaacaacacataaataataggagctaaaaatatgctgaatgcatgaatgaacactatacctcaaggaaagtttaaataatcaactcagctatttctagaaactgtaagttctccttcctaattgcccaggagactctgctgagcaaggcaaagattcaatttgcaaggaaagaattaaataatattatattgttaactattgttctactacagttttttcttttaaaaaacaaaaattcttttcacattgatttaatcaggtttagcttagtattgtctaggtaatgaagcatcaaaaatattttgcaaaaagccagaagttttggcaaaacttaatatgtatttttatttgcctattttcttatctactatgatggtttattaatatgatttactactttttctttttttataaaggtgatggtcacctctcatggaataatgcagttttaagtactactgcttgtatttaattatctagttgtgatcagcattctatatcagaacacctaatcaagcgattttaaccatgctctttaacactaaactctgtataacattatttgaagtaataattaatacttttctttcatttagactcaattgtaataattttctgaattttttaattcccttttgttagcaaatgtagttagcaacctaattccttagcaactgcattactttctcagttctttaagacccttgttaataccctcacccatttcagagctgaaattctctcagagttttataaaatattagctcaattttaatgttcttgaacctgaggggaagtgttatctgagctccattttgggaataattttccagtttatttttctattattatcttccatatctccagttaatttgccaaaatgtgttgactttatgaaatgattgctttgctgatatgctttgacagaaaatcaaaactgtttaaaatggaataagttagcttatttgacttcttagtcagaaactggtattgatttatttcaacttctcctgccctccaatcccactatagaggttttcattttgagtagtctaatatgctaacccagagatgatgagtaagtttcccctcattttctttccaatctgacattactcatatgcccattctgtaaccataccacaacaataaaaattaattaaaccaaaatacgttcataatttttaaaaataaggataccttctcttagtaataactttacagaagtaggatttaatattattcttttgacttcttttaatatgtcaatataagaaataataatgtttctttatcctttctaatcccatattgaatatattgaagtaattgacaagtcctttttttggatcagttttacccaatttgatataatctcatgtaatctacaggaattcacttgaaggtgaaatttacttgtgggtcttcatctgaaattaacagatagtatcattataataatggtattacatattcataaaattacaatatatttcttaatttctaccaagtgttagtgacagagaaactcattcaaaaagtgtatattattttccactgtttcgaggataaatttattagactgaatttgtgatagtgcttttaaggaagccatagatgatccatagacttccttgcacctgtttttccatccctgcttggcagttagacagaagagcaaggaagctgatcattggattgacccagctttggggtttttcctggaggatgtaaaggaaagtcaggcatactaaatgaaacaaataggaatatcttagaatctgaaatttcctgacctacttgaattgaaagcatcggataggatgtagcttttaactcatttaaactcatttatcatattaattgaagtaacagcaatagtattattccttacatttggtaaatgtacttttggtaaatattaaatcctacttctgtgaggttattactaagagaatgtatccttatttttaaaaattatgaacatattttggtttaactaatttttattgttgtggtatggctacagaatgggcatatgagtaatgtcagattggaaagaaaatgaggggaaacttacccatcatatctggattagcatattagactactcaaaatttggtaaattacaaagctgaattacatatttctgtgtgaatatgtctagttttagttatgattagcacttagatatttacgaattactgattttttacaatttattattttggcttgtgggcaatatgaggaaggaacttgaagcacaaactttggtgcaagcaaaagcaactcatctaggaagaggtagattcactttgacaacattagtaattaacgcaccccttaaaagtaatctcctaataagcatttctgtattttagggtgcagttggtaataaaggtgaatttggtgctcctggaattcctggggaaaagatatgatggtttactctttgatcaaaatttatggttattttataaagctgtatcagataggataggaaaatatacagaacaagtcctatagtttagaggtaatcaaactgtggccctatagtagggctgccagaaactctcactgtaggattttgtacataaagttttactggaacacagccacactcatttgtttttgtattacctaaggctgcctttgtgcttcatggccaagttaagtaattgtggcagagactgtatggcccacaaaatctaaaatatttactctctggccctttgttgaaaaagcttgctgatccctgctccggaacattggctgctattcttttagccccagggcttctcaaattcaccattttatatataatatggtgtcttaatatgtatttcactgcagacaaaaattaggcagtttatgtaaacattttataatatagactataagacatactataattaaaaatataagaaatatatttcagtgtatcaataaaatgctatactgtaggctatagctcataaaatgattgatttttatgtttttcctgtaataccacaaagatgattccaaacaataaattcactcacgagaagttactgttgcagtttagcatcttattcaacttcagtttttgtagaatatttaaaaaattgttgtatttgtatattaaactgcaatcaccttgtcgtatttttccctatatatgcctatattaatattaataactttgctaaatttttaaagttctcatatgttgatgctaagaaaattctcttctttatgaaaatatgcttagtataagtttttgtggcattctagctgcactgattatcaagtgagtccattgtgtcattatctagaaggccatgaccattgtggttttattcacctaaagttagcacagcaataactgaagctgaagcagtaggaggttcagaggttttcagacagatattttttcagaccttcataaatgtgtctctggtatctgatggcttcattgatgctactttttcctttcataaattattcagtctgatatgcaaattctttactcctataggaatgtaactgttaaactcagtaaagtccaacaaactctattgaaaaacaataccttgctgcaagttgatgtttatttgggctgctatcttcttgtataagcttactgatgacattaattgacgattcttcatcataaataaaagcttctttaaatacttgttcaaagttctaattctttaaaaatatcttttctctagagaatattacttgatcacctaaagagatgccccaatctaaatttaccttgtacccttattctaccaatctttttctaaaatgcatcacaataatctgattgtttagatttcagatcattaggagtttttgaattattctgaacatgggaatcttttttaaaacatttgcagaatcaccgaagcgcttgagctataaaatagattgtttgactttattgtgggatgtaacgtgagacttacgtacatttacacaataaattatggcatagcaggatagaattccctttgaatgctttaaaacagaatttatcaaggttggtataaaatagcattaattttaacactccaaaatgacagcccttggatccttatgtatgacaaccaggtgcaaactgctacttattggttgtggaacaggttctcaactcctgaaaaggtgatgtccacagactgacaatataaggactagatgaagcattcagtagaatcaatcctgtcaaaagctgatcaaatgaattgccatccagggccatgatagtaagaaaacaagtctagaaagttaagtatgcaagccaagaaattctctagaagaagagagagtttcttagaaaagagagggcatttagggcaacgtgaaggaactggagcaagtcagtatttcagagacaggcactactcagaactaaaaattttgtttcttttcccagaagtccacttttgtagaaagaatcttgtgtggtgattcatcctatatttcacttaaagtaaaacttcagtgaatataaaggaaaatactgataatctagttagatgaagtcattctgaaaaccaaaatcctcagcccttggtgcccatttggtcaaaatggtgactgagagagtcttgcaaaatcagttaatgagtgtgtctgtgtgaagacactgttcccagagaacttaagaagctaatatcataaagaagcagctgtttttatggtgttctaaaaccatggcaaaattgtcctggcaaatactctttcatgtttcctcaagcagttttcttctgggtctaatttacttgagttactcttaaagggtctcacagacagttagagaattcatgtaacttccagtggtgctaaatatggtaacagattacgtttaactcttggttcccggattcacacatcatcagagaccgtacttagtggttaatatccttccaatacctatagaagcactgagtctttgaccactttctcttcccaaggactcagtccctggtggtgccagctatgattctaacttgtcacttcatttagctgttaaaggggtgtgacactcttgagtgaaaaaatgccgcctcaatagtgttttctcgcttctataatccacaggttaccacttattgaaaataattctaaagaatgtatacaaaatgaaaacaagaaagttactagcgtattatctaacagtaggttaataaattgtaaaattttttttaaatttcaaaattttaaaatcatcctcatgaggtttatgtttggggtgaaatatttctgttattttacaagaaaaatggtttgttagatttttctaagtaaatttccagagaaaaattatcagttcttaacatgtgtgtcacctcagggctttgtatcccacatttgcttcaacgtgaaatatgtgcatcttccagagtaacttatccagcatccccttaactttgactctgcttgtcagcagttataattctttgttttgttttgctttgctttacatagaatcaggagtacttaagagtactgttaaaaaataaataactaggttgaattgtttaactgtttcacttggagcaaaaacatatgtacaataccatagaatatgtatctcaggtctaatattctcaaagtgaagatttttttctaaagttaacatttaagctaggaaactgatttatattaatggagtgaagcatattctgagcagtatgaagtattaatttgtacattaactatactttacacttacatcaatgtcatacttcaataaattaagtgatttgcatataaatcacattattctaaaataaacctacactttgaaatttagctaggtaatagcagtaaattcttttaagtcaagactctgaacaatgtattaatatactgtggtggcatttttcctctgacaccaaggataaaaatagtacactaaacaacacaattttataaaatgtatttatggaatgtggagtcatgaggactctaataaggatgaagtatagcatttagttatgttcttttgtaattgtaatacttatcacccagtacagacttgcagtagacattcttaatctaatattagttctaatctaataaagccttactgttaaacattgcataaaaataactgtcccctttacatttattcagaacagctatgattttgcctaagagattcggtaagtgttctgttatgagttcatttaagaaaatcagttctgtgtagcagtattattaggtagctggcgacttctggtaagcttggatggacagaaggctctgtcaatcaaaataagtaaactggatggttccatttccaagagaagtgaatgactcaaagcatgagatcacatgaatgcagccacacacacacacacacacacacacacacacacacacacacatgttcacaccttgcatcctcatggtatgaagtaggaaaatgagatgaggatttggacactatgagcaaattttgcccactttgcccccaaatataacactcaaatcatgtttgttttcattacctgaatacttcaaacaaaaaagtgcctcatttcatacttcacttatgtatttaaacataaaagatatatttctctagaagtggggatttttttctaagtaggaataattattgtccaataatcttatcctaataatgtgatagtaaaaattgaacaaatatagagcctaatttatgctaaaacccatattctatctactaaattactttaaatttgccctaaaatgtttattttaataggaaaacttttactaagttaattttgctccccatggagtaagtatgaagtaaatcatagccatcattactttactatgctaatattaaatactcagagttagactgcctgggtttgaattccagctcaaaatcttactctctaatttagagcatgacacttggtctctctaaatgtcagttttctcttttataaaacaggaattatattgcatctacttctagctttatcttaaggattaaataagattattcataaaagtgtcagcacctggtatgtaaatatttggtaaacaacagatataattttaacaataaacagtttgatgattctattattctagccttactgtgggaccagattagaacttatttgaaggaatgtatacacttcatcttagccaaaaggccaagaagcaaacacttgggggaatttatattagttattgaaaatatatttacaggaaaatgttaaagtcacatatcttatgtaaccttgacctcttaaaacaaactagatgtcagaaaaccagtgaattcctcacttattataaatatgtacaagaatataaacttttacaataataataataacagccatttactcaaaaagtgttatatgctaaatgctatcaggagccttcttcacattatttcattcactccttacaacacccctgtgaggtaagatttattgtcactatttcacagattaggaaacagatctagagagagagagggaaaaaaaattaaaaacttcccctaacttggtacggagaaaatagtagagtcaggatttgaacctctatccatggaaatccatagctcttgcccctttgccatattacctcatctggacagctcctcaaatattcagatttcatttacacaggcaggtctgaattagatcttaaatttgtttgcctgccagtttagtgagtgaactgcagtttgcttcggacatcctgctccaaggagggctgtgtcccttccctttaaatccaaggaccccttttaaactgtatctgaccctagggattctgactcccccaccttcataagattgtgttcacctattaagaatcattatgcatatggtttttcaccaaatgagagggttttgtctagctttaccttccaaaataagtatcatggaaaaaaatttgcttggtttccaagtacaggttacatttgaagtgtgttttcaaacattccgcgcttgactctctggagattcttaatctaccctgcatgcccacgtccaggcagctcaatcatgggcactctccagattaaccttaatgcaacacctaatgtagaaatttttctcttacattctccaccaaataaatatatataatttatttatcaaaaacaaaattgtttaacttagtaccatggctttataaaaatataaaataaatcaaccttctggaagtaaaaaaagctgtatatattaaagcacttaagaagtacatctgataacatgatgagagagtggccaagctgcatgtcttaaaaatagctggactaactatcatcattatatgaggatatgctttgtatgatgggtcttttcaccataaactctgaagccctcagcactgcagtgagatgagactgaatgaggcagatccattgttccctaacagtctttgtatttcttttctgctggaaaatgaaatgactatgatctttgaatcttgattttccctaaaaagacattttatgagaagactgcagcttcagaaaataaaggcagatgctgttacagtttatgtaagtgcagacaaggccaatcactgttgtgaattataatgaactttctaacagtgctggtccagatgtagcattaatgcttcagagactcagaaacttataggcaagtagtataaaagctagagaattttaagccatttggcttcctctctatatttctagcctcacctaatttttctgtgcttaattttagacttcctaagtttaaaacataatttaaaatgcctaatgcatgtgacaatttattatagaaattgaggccattaaatgaggaggaaaaaaaaagacaacttagctttattctatcaatggaatacttcctgcctatgaaattgttaggctttataaaacaagaatgttttccactttagagaaaaatacctcttaagcagagaatcacctgtatatctgtgtaatttagaaaattctctaatgagtgaaggtatagtcaaatctacacacaggattgaatttttaatcataattagtattcatagaaaaaaatgaccacaaagaaaacagttttgtaagcctacttgttggctttacttgttaaaggtaggagaataaaacttgaattatcagtgaaaaactattgctcttacatggaataactgtcatttaattgtcttatctatagacatatattgatacaatatagcactaaaataagcagaaacataagaaggacaaagtaatagaaggacaggaaaaagaaaaagaaacttgctcactctgcagctgattttatttcttaatggtttcttattcccttctaatgccttccactcacaccccaagtagagcagttggcagggaacacaacagatggatgacaagctcaccacatgccatgtatctggcacccaggcacttgacttttatttgctaaacagtcagatttcaagaacctagtctgctaatgttcctgtttggtttaatgtactaccagcttctagcacgtaaatattaaaatattgccataagaaagctcacacactctgtgtttctctgcatagttaagtggctaattattttattcttggtgtagatactgaacagtggatttaaacatataactggtattttataaagacatctatgattttagatattagagtttccttaaagtggctctatctaaaggagcttttagccagacacatcagggactgccaaagccggtgtaaggtattgaatgaacctgttagggaagactagaagatttgagcagatgatcacagatgattggtatctttcttttctatctccatcactgcattttcagattattaaactcaaaacacatgcatttttttcatgaattctcccaggccaccaggcaaaattacagcttatccactcagctcacatagcactttatttatatcaccaatgtagagtgtgtctatacaccctgctaaaatgtgagctcctggagtagaaggacttggggtctgtctcatctctaatcccagcaactgacccagcgtatggtacctggctggttctggataagtgtttgttgagttgttcagaattcgaggacttagccccaagccagaaatagagaagagaaatagagaatgactgttagaaaacttcgctgaggaaagatcggaaaagcaccccaatgccagcaacacttcagtgaaagtccttcgtactttctacagaagcataatttagggaaacaagggaatctcttctttgcacaacaaagtttacaggtattgcttcctagaattaaatataatagaagtgtgtgcatctccagaatttgctttccattttctcttggagaaagtatgctcttccctctctctcaaacacaaatattcaagttatattgctttctttttatccaaactagatttgaaaatctcctaactttcttacaacattgttagggtgtgttccttctccatatcttcataaccatttacttcagggctaaagataagtaaccaatggcttcagtacatttaaggtccagtagaagtaattgatatggaatagaactataaattactcatcacgaggaatactccaggcaggaaatagttttcagttactgctatatcattgtcctcaattaggagctgactgatgacactgtccttctctttatatcttaaatcatctttcacttgttagaattctgtattcagatgtcaatcactatacttcagatatttcagtagatgattcacattaaataagtatttctgtagtatttttatgaagttttaagtttggtttaaagactctcttacagttagtctcataataaagtgaaaagcccaaacatttgtgcctgacactttcaggaaatcatcacagttacataggagcccagattttgtagtgggttctacaacattgactaaggcttaattctctagctttgctatgtgtaggaagaaacttttacctctccaagacatttcaaaattacttgggttttctttttgtttttttatttgaataactcttagtacaacttgtatttaattaatttgaaaaaggattgtaaaataacatccctttgacaggaaaacttaaggattgtagttgactacaaatgtagcatatgtaaacaatttagttttaaaaagaagcacgttgtattaatagaagtacaaaactgtatagtagccacagcaaagtgtgtgtgtgtgtgtgtgtgtgtgtgtgtgtgtgtgtaagagagagaaagagagagagagagatggtcctgttctgtattctatgtgagtaagaccatttctggaatgatgtgctgagttctgagagccacattttaaaagacatgactgacccgtgtgtgcccagagaacagggaccatagtattaagagactccaaactatcatttgaaaaatgagtggtttactgaatagaaggcttgatagtggcacaaagggatgtcatgtataagacctataactttttttctgtgtaattgcagacagaagaaataagactgatgggcaaaatatggggaaggttaatttgggttcagaaagcatttattcagtaaccacacagtgaattttttttctttgctctccacaatgcaaattaagcagcaaaagtatttgactttaagaagctttcaatagagttggtgcctcatcagattctttggtggagttgttatacataaatgcatgaatttatatttgtccttaaatttaagaatgcccatcctgcttgttttctaggcacatgcacctgtatatacatacatacacacatatacatatacactcaggataatagattttaagagagtagatgttgttagctaccactaaccacccatacatacattaccatgatcaagacatgtattgacccataagaataaataataataggatctaattcatttaagattaaagtttcaaattggccttatcctgagcattaatgtgattaaaatatccctatgcattagccgcattaaggatccaaaaaatataaagaattcaaaaagtttgagattttaaattctttgctatatatatatttttaacttggtaatttatttcttagaatgaagtcccaaaatatagaaggaaaaaattctccccttgaaataaaagcattcagattggatatctgaaaaaaatttaaaaatataggtttttaaaaatttcctgaaacgtttaatggactgccaacagtttaagaaccataaaatatttcaatttctaaagattatggctgaataaagcaggactatagtcagtaatgtagaggtcaccttagtaatacacaaaatcaaaatcagatttacttttttctgcctattttattggttttagtcctagaatcctggcattccacttctgatatttcttctagttatttcatgcaatattcaacttaagtaaattttcttttaataaatatgaactaatgaatggggaagtatgatatatttcaagtggacactaaatttatatagaaggttatactcctagaaaaatatgctctaagtaaaatgataggtcaattttttcagtacagaaatgttataataggatctcggacattttaatcaaaggctgaatgtctaactgttaaaaaaaatcaccacaggatagtatgtaactttctactttctggatcaaatgctggttatttgcaatttttttgtttccctgcttgctttatctttatttgcttggtctcatttatactgggtttgcaaactatagccctagggaatgtgattttttttatcaaatgtccttcagacaatatatgtttcctgcacaataagaaatacattacttccaatgtcaaaagaatcaagaaaactaataatttatagtttatgaccagctatgcttactgttgaaaaatatgcagtgattacaaggacgtaaaattaaatccagtgatcagtttttcagaaagcaaccagctgaccctaaacatcacctaactttgtcccaaaaacttctcaaagaggttattttgaattttggaaagggtactttttgattgtcctgtgaagttaaagacatgctatgtgttatagtaataacccaggcaacgatactatcggcagcaacattagattttgcctgctttatattacacatatttattaacttatcttcctgtagtttgaatttgtacctgaaaaggaatacaagtcctttcatagaaaaccccgtaatgaaaaaaaaaccctcagaaataagttttgaaagttatggtttctatgggaatcatttattgtgattttctttcaataatgaactaaagtattgattggaagccaaagaagaagcatcttatttcttcttggactgaaattttgaggaaggagaggcagcaggagttcagaaaagaaaactaatgtgtaccttccagtaattttaggaggatatttattttatgaatagaattaaatttgccctcaaagtgcttgtggcacctagaactataaacctgggtgtcagagggagcataaagaaagacttcttctgttgacataaggtaggttttagataaacacatttcctatgagataatcagtgatgtccactgagttatcgttgagtctagaattatgtttataaaacacattcagtcaagaaagagcagagaccatttaatgctggccacaggaaaacacagtgttttaattacaacaatcataaaacctgtgtccattaaagacatattctcaatatcacagctctagagagttttggtacccaattaacagtgcatctgggtgtaatcctaacctgacatatggcaggctaggactttgggtgccagtacccagagcacctggtgcatgagtgggctgtgagcaaagaaaaaggggagatactatcacaaccttttttcccaaaaaagtatttttggcagtgtataccgtattggcgtactttaatggataatatgccatatctcatgatcgtatgtaactagtaatatgatataaaacattatactggatcaactgatgaaaataatctgctccttatggacaagtggacatacttctgtgatgagtaacaggagctccatttccatagactgtttcctggcaccaaatacttaatgtgttttcactatcactttatcaaatgatattggaagtttctaatagatttgtgtgatgcctgaggtctaaaactataacaatttgtttaatgatagaaatgtatttattatatagataagtagattatattttgttgattctgtaacatttaattacatttagcagcaaagttttactttagtgtttagtatatactgtgatgatagctgttttaccgtagaatactttgataatttaatctaatctaagaaaaacctcaatctttaaaataatatgtgtgcatgtatgtagcagacatctctggtaagaaccactaaaactgtccttaaaatgttttaattaatgaaataatgaaaaatttccttagatttagacagaatattgctattttaaagtttaaagatgtgacttttttcttcatagattttgaattttgcttaaataattcaaataaatgatagctaattgctttctagggaatgtttaaaaactgttatcttataaattaattgtaaatatttgatagaaataaagcagttccatgaaattgttagcgtattttgagctgtctaaacctggaaactcagaagccaaagtaaattcctataagcaggaaaattcctaaaactctattgagaatatgcacatcctctcaagagtatctcattctagcctgtgtgctgtttacaaaccagacttgtcaaagagatgaccccagaattccagcaatggaaactaaaagccatctgtctttttacccaagacagaaaccagatgaacaggaagaactaaaaagtcttccaagtaattgctttatattaaatggcattgggtatgtattcaaaattgatctaatggcaatcaccagatatgggtaataaagtaaacatgcttgtacatatataagaatacacacacacacacacatatatataatatatatagtgagaaaaaattccgattttaggcaagaagtcacttaaagccagaattaaatctttttccaaagacagtgtaggaaggcagctaggtatgcagagttgaagtgtttgggctcaaattccaagtctaccacctattactgtgcaatgacctgtaagaagttcattgaggcagtattatctgcctgatagttttgttgtcaaaacagcagtgcctggcccatagaaagcacgatgtcagacttcaatattattcccagaagtttcaaagagagaaaatgaaatgagatactaaataacatgtggaaaaacataggctgtaggagacctcagtcccaatcaggtaagttactagttaggtgacctttgacatgttaccaaacctctcggagcctccatttccctattttaaaaattgaggtgacagtcctggatttgagaaataaggaacagatggaaagtccctatgcatgatagatattcagtattaggctacctttccccacaacactagagctatttgttaaagaccacaaaaacgtctatgttcatatatctttatggatcataaacattattctgtgtacttcttttagggtgaaaatggtttacatggtgctccaggattccctggtcaaaaggtaaagagttcttgaatgtttcatctgagttaagaattttaacgtgttaaaaataaatttgcacataatattctgaaattgtatttgattaagctgaattcactcaaagacttttagaaagctatggatgtcttttcaaagagaacttgtggaagcaatcccctcttgaagggaccattctaggaggaagctttatcacagagctttagtaacatgctcctccaaagaactaaatggtagtagtgctttctggggtccgtgatagctgctctggaaacgtttctgcttttattagtcagagtctaaaatgtaaaatagaacaaactgtactccctttgactagttttgttacctcttgcttatcttcttttttgtatatcccagatagagctaaacataatagttagaatgacataaaatattatatattacaaagatgctgtagacaactacctcttcaaaaatatttttctttcagaacaagggattcctaataagcaaggagttttgcatgggccaggctgcctcttcctgtgcctagtatctttctctttaacaagatgaacttcctttgtgcccccacttttttttttttttttttttttttgagacggagtctcgctctgtctcccaggctggagtgcagtggcgcgatcttggctcactgcaagctctgcctccgttcacgccattctcctgcctcagcctcccgaggagctgggactacaggtgcccgccaccacagccggctaatttttttttgtatttttttagtagagatggggtttcaccatgttagccaggatggtctcgatctcctgacctcgtgatccacccgcctcggcctcccaaagtgctgggattacaggcgtgagccaccacacccggccagggctgctttcttcttctgggaagaagcatggttatctgtgacaagcattactaaaaacacagagaccattatattccagtttcttggagggacggggagccacttcaggtggggccagctgtcatgataccatccagataatcccgccgcaggagagagcattattgatgtaatattagatgcccaccaaagccaagcatatcatttctgtgctctggagatgttttactggttttggcaacaacatgtcagaagttactatgcatgtaggtttttctctatagctgaaaatatcttttaaaaagatatgcacttatttatagttacagattgtgttaaagaatttatttacttggcccaataaagataataagattgaactggcagcaatgaaacggcaagcttctgaatttcttcacagcagctctagacaaaacccattaatacagcatgtactgcatctgcgagtcaagttgcaagccaagggatgtgcagatttatctgctgggaaatagttttggactttccagcagctgtttgtggtggctgcatcatgctgacattgtggctgatgtactggaggcgtttagcagcttcaatgtcagcttgaattaacagatcaagttaaagtctatattttaggaaaaatggtagaaaaaaatatagaccatgcattcagtggtgaaaaacaatacctaacaactgacatatattctttcctggtaacttttagagggtagatgaagcaaaaataattatttaattacatgcatgtaacacacacacatatattatttaatcatctaattatattatctaattatgtatactatttaattatataatcataaacatatatgcaattatgtgggtatatatatataaaaaacatactcacaaactaaatatgtatgtatacatgcatgcatgtttctatatagttaaaagctggcattccctttcatataattagtataaattttatgtaccaagggtcaccttgttgaggcattacagaaaaaattctagagatcagaaaccctctatctcctgtctctgtgcactcaggaaatgcttgctgaatgcttcttatgctccaggccctccatgggtggagagatgcacatgacctgttcccaacattcacttgctagctatgttgtcatgagtgcctgacatgtaggaggcactcagtcaacttttgttgagtgtatgaatgaaacaccagttaaggggggagataagcttgtcagatcagagagggtgtagatgaagaaagggagatgtacaccttttagtataatcatggtgattgagagccagcagccctccaaccaccaatcttctttctgtgactgagccagcatagtggacaagaagaagcatagcactggtgtcgaaggtagagccagaacccaagggttcaaacctgaactcattcatcataagacacttaccagaatggtatgccatagaagtcagctttctaagaaggctgtttccactgaatctagtaaaataaatagtaattataagaagaatggctaacttagtctttgccatgaactatgaggatgaatcaaactctcaaaacaaaccattgaggaagatagtattatcatacttattttatacctgagaaaattcaggcttatcaagattaaattgccttggaagtggtgaagctgtaacttataccctagaaaattgttcctttagtatttagaaatatttaaatcttatgtaacaatattggtttagagcttacatgttagaaatggttatttacaattactgatttttcattgtttgaaacataatttttattgtaaaaattgcatgtgttataagtatcatttttattactatacacatcatattcctcttctacagggagagcaaggttttgaaggcagcaaaggagaaactggtgaaaaggtaaatatctctttttacattcacatctgtaaaaagaaattgttcttgaaaatgttttgaaataaaatatttaacttgttttgtgcattccctataagcaattcaataattttatagacataactaaaacatttgcttccattgaggtagaataaatatattaatgattgccagaaatctttcaaaacttatttggatggtattaatagttagatatttctagttaaatttgtttcattgacatggaaatgatttaaacatttataaagcattatatttttatattatgaaatcattcactcactaagtatccaattatttaaataaatgtttgtttttatgtacaactggtttatcagtggaatttttttcctgaaggagtaaataagaacaactaactgtaaaagtcaggatcccacagaaaagacttggcatactaaaactcgaataatttcaaagagtttaataaaggcatggtttaaaaagtacggacaaggtataagaaaaccatagggattgtgcagtatcccaggtcaggttacagcagacctcttaaaccccacataattaccagacccagagacagagaaaagtgtgtggccaaggctggagacaggagctgagggtagcagtcagcccaagataagcacataaaggggaaatcagggcaataaacacctccatcccactatcctctagccctcagctctcctactagcccgcaccagccaaaccaagttgagagccagtgagaatggaggaaacctataaggctcagcctcccaaagtccagagcaggtgtataagggtggacagtggatcatgagagaccaatggcagatgccagcccactaatctaagtgctgtcatttaaagtcaccttcttacaaaactaaattctgggtgcttaattttacatgttaatagagtgttttattataataaataactactgaaagtcatttgatagtgaaaatacttaagcaatcattgttttacaaatttacaactttctattgaaagtacagagaatagaatgcttggtcatccaaaattttccttcagataatcatttgaatcctttttcatttcaaaattcttgttttgtttttaaataaaacaaaaacagtaccattcttttgtttaataactcttgtgtacatcaaatgtatgtatggaattggatggccaggagagctagaaaggagaataatctcaaattggacagtcttgcctgtattttgctttcttgccagtgatcagttgtttgctttttcaataagtatttatagagagaatgagcatctattataattataagacaaagtacacatgttacaaactacatgataattacttttcctcacagaactcagaaagaaaaaagaatggccttataataaccatacttttggagatcatttcattaaatgatgactatttttaaggtgaatatcttttcttagaaatcccttgaacatttttgctttagaataacagccatttggaaggccatgtctttaaataaatgctttatttatacatattcctgatttattaagtgggattttacctgtaggaataagtagtgaataagcctgaacagatatattctctgtaatttaaagtcaccaatacactaaagtcttagtagttgttttgatagtttatatacatagctggtatagctcaataataaatagattctcacaggttataaggcattagaaaaccattcaccgtatttggcttcaaggattttccttgtggttccacatatctattaactgttgcattcaaatagtcaatttcaccacaaggtagaaatatgtttgtagaatgatttaaatatattagaaaaaaataaagcatcaaacagaaaagacaatatgtaccttgaatgagaatcccaatttagatgatttatagtcagatataagattcatgtaataaccgttatgttactttgattggtgcaaaagtaattacattacaccaaccaagtaaaaatgatgttctgctttattatttactgtatattaaatttttgagttttttcaatgttagcatgctacatattctgacccagaaccacatgtattttttcatgagataaataattgaggtcttgtagttcactttatttctagattaaacaagaaaagtctatgaaacattcacattggtgtgacaacagcatggattactcacaacataatttattttctgaacaaagtcaatctaccttggactttaattttttgtggaaaactgagtatataatcattttttaaaaacccactttcttctttaattaccctactgtggcctttactgtgtttaatttgactgtttgagtgacaagtcaccagttgcaaaatacaattcaggacattgttattggtcagagatgtcatatcttccagaaacacatagttacggtcaaaatataaaaattacatcaactgcaaaaggtaaaatactacctgatattttcaggtgacatttctataatgcagtggaaaccaactggagtaatctgcttcttcccattatggctaaaaaaaactagctttcaggccaaccgaactcactagactgacaaagtagctcctcaaagagttgaacactctctccttagtcctgagaaaaacctgtggcactagaacaagtataaaggacctcatttaaagtatatttctgaatctatagaaacttgtaacaacagggcagagcctcatacattcctgaacaaacacaattcagccaaattagtcctgaagtgaaagttattttaaggggtagtaagttctctcagaaaggttgttggtgctgacatgactctctcagatgacagctatttgcaggtttaccatgctgtggtttatcatgtagacctataggaatgaccccatcccacttcaccatccctagctggcaaagttaggtgtgtatcacccaaggatccttgggctctccaacagcatagctcatgaggcaggagggatgaaggaccctctccacagctgagagttgtattttggcttctctctctatataggagtagtcttctggggattttccttagattccttcagtactattattatagtgcaggctgctactacaaacaaaatacggagttcaatcctcagataacagttatccccatactatctgtcagccttcccagcaatgatttcatcaaactcttgttatgtaaccaaatgtaaatgcatgaactaagctcttacattacattagaagccgtccgggaggtggggggcagcccccgcccggccagctgccccgtgcgggaggtggggggcacctctgcccggccgccccgtctgggaagtgaggagcccctctgcccggccgccaccccgtctgggaggtgtacccaacagctcattgagaacgggccatgatgacgatggcggttttgtgaaatagaaaagggggaaatgtggggaaaagaaagagagatcagattgttgctgtgtctgtgtagaaagaagtagacataggagactccattttgttctgtactaagaaaaattcttctgccttgggatgctgttaattataaccttacccccaaccccgtgctctctgaaacatgtgctgtgtccactaagggttaaatggattaagggcggtgcaagatgtgctttgttaaacagatgcttgaaggcagcatgctcgttaagagtcatcaccactccctaatctcaagtacccagggacacaaacactgtggaaggcagcagggccctctgcctaggaaaaccagagacctttgttcacatgtttatctgctgaccttccctccactattgtcctatgaccccgccaaatccccctctctgagaaacacccaagaatgatcaataaatactaaaaaaattaaaaaaaaaaaaaagaaaaaggccatttagcaaggattcattcacgtgctcttcactccttaaccctgagctcaagtttttactttatgtccttgtgaaggtagaaatattacttggttacatttatgaaaagaaacagcaaatagacaatgaaatgtaaacatctgcctcattataccattcaatatttttaagtaattgcttcaaatcatgtaatttagtttgcttttaaaatgatgattattttatgttgtcactcaagttctaacttgaagtttgagaactaattttctcaaagttaaacttaactgcagaacctattgctaaatatcatttgattgtgagaaacatccagtggcaactgctacttataccttacttttcttgatttattacctaaaatgtagtcgacttggttcactgaatagtgatgtttaacttgggcatatatggtggcagattcttacctggatctaagatgcttctgctggtgtggaaattttccatttgggaaatgaaagttttctggtctcttgagggcctcttaagtttgataaaaagaaaaaaacaatcaaatgagcacttcttcgtgaatcataagactgaaggagaggtggagagcatcaaacatgtggcatattctgcagctgtgagagtccatggttgagcaagttcttgctttctcttgtttaggcttctgggcattatctactttgataatctttattgctgatcttttcttccattctgggttatactaataacaataaatgcaaacacaaaactaacaagttcatatggtccctgctttaactcatctcttaaaaccattgttggaaaactagttgtaaatttccagtgacttgtgattttttttattgtcttcttcttaccaaaatataatctaggtcctaaaatgccatatgagatatgtatttaaattagaaaactgtgtttaaatatttattactctggttttatagtggttgcaaatattttttaccagacagaatccactggaaaaacattccacagacccgtattcttagttgatttattgaactctatattgttataaaattccgtacaaaatataatattcaaatgaatacaattatttaaatgtctactataacgtagcgtaaagtacacgtagcgtaaagtacactttgctacccacaaactatctggggttatttataataaagtcatgcatcaaaacatttgtatttcttttatcaccagtcaacatcagctaattttcagatgacataattcaaatttttgtaagccagcctaaaatagaatatatttaggcttggtgctgattgtattagtattgattttattagcactaattttatatgccaccttttgccttcagtggttacttttgaagatgtgatgggggaatggaaaatgcttaatagaaaatgtcttcacttatctatttcataggttaatcattgatattgttttcttatcaaatgaatattaaaaatagcagcagtgaattcattcttgttattctgttgcttttttgttttcagcattaaaaatatatcagcaattatgatatgtctcatatagtcctaggctcataagcttgttggataatttatttggtagcattttgttcatttatttcagatagatagatttaacttttatatttaacttgtaacagcagaaattagataatcagactatttttatactagtaccacaaataaataatgtcacctgcaagcaactttctaaaatattgacttctagcattaaatgtcatgaaattatagtaactcagaaaatcaatagtgatcatttgctactagaaacaacagttatggctttaaataaatgaggatttttaccctgaaaaatctttttacttttgtcaatttctcattcagttgttatggtaattacatgcaggacatgagaatttgaatgagtggttgtgactttgggccacttaaaatttggtattgagtgagaaaaagcccaaataaggatgtttatataatatacgtaaacgattattcaggacattctggggcagcatctagatcactcaacaaggaatcaacattcttagtttctggagtaccactcctgaaagagcctagacttgatgtttattttgaaagtgatggtgacatatcgtaaaataaatggattcacatatttttgtgttctgtgttccagtccagctctgtaatggcagctgtgtgaacttggatatgttcctagctttctttatcatagtttcctcttttataaaataaagttaattactacctcacagaatgactgcaggaattaaatgagtgccggtgaataaaagatgttcaataaatgttaatatcctcagcagccaatatacaaaagtaatataaaatcttaatattttgacaaaaatttatttgacagaattattatatatctttatttgtgtaatattaattcctaatttttcttgtgaataagtaaataaaagacaggaggctatagtagttagctactgatatgtgacaaatcaccccaaaacgtagtgacttaaaacgttcatttatttagcttgtgattatatggtttagaaatttacactaggcttagctcagtgatttttttttgtcttagttgatcttatctacgttcattcatacaattcgcctgtgttatcggcaggttgtgcatccagggactatgcatctgtggattcacccaaccatgaatcaaaaataaatattgagaaataaaaattaaaaataacaatacaacaataacaaataatacaaataaaaaacaatataatctaacaactatttacatagcatttacattgtgttaggtattataagtaaactagagattatttaaagtatatgggaggatatatgcaaatactacttccttttttataagggacttgagcatccatggactttgttatcagcagggatcctggaaccaatccccagcagattctggggcaagagtgtgtatctcttctcagttgccaggttggctgagggtggctgggctagtttggcctctgctagacaacatgtctccactccagatgatctctcatcttccaacagttatcctggacttgtcctcaaggtgaaggcagggatccaaaaagaggaagcagaagcatataaagcctctttagcctccttgctcagaactagcttgcccccacctccatcaccaccatgttctactggccaaagccagtctcaaacccagcctagattcaaggagtaggaaaatagattccacctcctgatgagagaagctgcacggacacattgcctagggtgtaaatatatggagaggtgaaaaaaggggccattttataataaatctaacacaaatgatataaaattttattttaaattaacagtagagtagaaagattaaacagatttatcaactttacttcatttttttccttctcccatggcctaaaatataattcttaaagttaggtttatatagtgggacttgcagactgtgtcaaaacatattttgaatttgaaatggtagaaatactttatatgtaataggaaaatattattttaaaaatcttaattagaatgggaaaaaagaaacacaatatatcaaataattaaaccaaggaatggttttgtacttttacatagcaaaatgtacttattaactttatctaaactaaaactgatacaagaataaatggaaaaaacaagtcaaagttgaaatttttttttaggatttcatgattaaagcttcttggtgattatgcctattatttaaaactaatgcaagtatgttaaatactgctattataaatatagcactttcccttcatcactctaaagcaactgtctacatgttaccttacttcccgtgaattctgtcttggttcaccttgcagagttctactgaacatcagcgtgttatacaattgtttcctttaccctagtaacatgtaaactaaacttctacaatttttaggaaggacttacttgtttgatttgacagctgacttaaaaaataaagagaacagatggagcaaaataataactatgattttaaaaatcatagcaatttatctgtggccaatgataattggtatgggagtaaccatgccaactttcaattatccatggtagcaggcaattgggaaagagtgatggtaatcccacagccaagccagaggcttaatgctagtcattacagattgtgtattattttcctaattccttacagtgctcgtgaataactctaatttatgtgaaatatgtttaaccctctgttgttgcatcacttgctagtagttatagaaaaagtaaaatgtccagagagagagagaaagagagagaaataagaggagaataactataaagggctataatattttatgaacattagtcttttaaagtattattttaatgattgcataatatttcactatataaatacgtaatattttatgtgagcattcccttgttgttagaaatttaagaacatctgttaaatgtgttttcttatttgtgtcactggtgactttagcaaaataattttgatggaatagagagtagaagccaggttggagtttcctgaagagttaaattacaggtgaccgataaagaggccatgcagaaaaaccctcacgagaactagctgtgaagaggacaacagccataggacagtagctggagagggtgtgagtcatttaagaagactttattccaaaatccaaagccatcataaggtccttggcaggaaatattcttgaacaagttaggacccaaaagaaaaacacggactagttcactaatacagagaattccaaacgttttatacttcctaagaaatgtcagactttaggccatcatttttaaggaattcccactaaaatcaagactaagacaaaggtgtaactgctattatttaacaatattctggaatttctgaccaatgtcaattttacttccaaattatagtttaaatctgtctatttctctccatctaccccagtgtcaccaaaccgtaatcattagtcacctcctagttaatctccctgttctcactctttctcattcattttccaaattatggtcagatgcatctttacaaaactattcatgtggcttctattttaaaaacattttagttgtttcccattaggttaaaatcctgaatcccacaaggtcctgcaaagttggacgtagatgtgcttctcagaactcatctcttcccacattccccttttctgcttctattccagccacactgaccttctttcagttacttgaatgtgccaggcgctctcctgactcacagttgtccatcagtgtccccactgctttgaatattttccccttcatttagcttccctctatccacttagcacatcttaaaagtcattttcttggaggcttccttgactctccaatcaaaatctgctccttctgttataatttctcattgtacctttagcactatactgcacctgtatagcatttaccacaatttataattataaatatactggcatgaggattttgtttgtctgtttttctttctccaatagagtagaagcttcaagaaaacaacgaccatgtctgtctgtgtacgtttttatctctaacacctagttgaatgcctagcacacaaaagtattcaattaattcattctttactgtggggaagtattatagagaaagttaagtagtgtttcttttcagcctccagaagtatttaataattattatcttgatgcattcaattcagtatcaaccctatttttttcagactcctactattgaatttgtgagatatagctagggataaaaattaattttacatgtatggcccttagaattgtgtttaaaaagacaatatataaaacattaatatatttaatagtatgctaaaatttacacaggaaatattgtttaacctagtatatttccaatttttattatttgtgaatcacattgccttttggcaggcactatttagctcataattctataaaataaaatacagttcttttaataccagatattgcaatgtcttttgaatttagtagtaatgttaaaggttgtctactggctcctgtatcataattttactttccaattacagtggaattttgggctgttgactgtagtgaacctaggttagttttgttaaggaaatttattcactcaatattttatgtaatttaagtacaaataaatatgaaagtttggggtcacataagaaagaataaatagaaaaaccatgatcctcatttatgtaatgattaaggcaacttgacttttagtagtttctccttagtcagtgctgggtataaaagggtggttttacaatgtgcctacattttgcttttattttgacctttactccatttatcctatttcttcactccaggctctggagctgcctcaggtttctactcttagcttttggtcttccctttctcctttctcaggatctgcctgtgccatagactccacttcctctgctctctgctgggctccttgtcctcagctgctcattaatctcttcacccccactgctttctttttcatttgtttgacttacctcccatcaagcctgatttccacttcaggttactttctttcattttttcgcatatttttgtattcaaaaacaaggaatagatctcttaggcagtccctcaccacgactgaccctgagcatttctgaatgcagctgagtttaaattgagtaaaggcaactctcacatttgttatgaggtttatacacacagggtttttaatgtataaaaaaaagatgtgtttttttaaattaagaaaaacagaatagatttaaaaatcaagcaatttcttctgcttaatacaatcatcaaatatccataatttctaactgtttttagtaaatctcaattaataaatatgctttattaacaaaaatctcttttttggaagtacattccagatggtaaaaagataattaattcgatgtcaccaaatattacatgacaggtgtgttatttttattcaggagctaccggcatgtgaacttctttcacaatcaatgtaaaagcaattcactgtataggaattgctgaacaagtgtgtcctaccagaccgaaatagcagaattccactgcacagaaaacagaggtgttagtgcagctgctgttccaagtggatgttgtacagtgactagctgttttgtaagttattgtctaggcttatggtggtctattgcttcttagtctaatatcttaaaaaaaatcattggtttttattttccttgatatccttgatatttccttacaatctcctttaagaacctccccatcaatgatctgttctaatatcagtaaaggatcaatgaaacaagacagaaatcaaataatcaatttgctttgtcttttttcacttttccttattgttcctcattttctgctgctaatcattttgtgtaatcaaaactcaaggcaaaatggtaaagcgataatgctttgggcaaacattttgtggaatgttattttaattgcctgcacttgtccagccctggggaggagtgtggcaatgcagatggcttcagctggctgtattccaggaactcactgatagtgattctgcctcccacttaaggtttacttatgtgtacaaatgaatcatgcagttcatgtcttggtaagaactacaaggctggagcacatgatagcacccagtaatcacagagcgaatcaaggattcttccttaagttagtggaaagttaggaagttatctaaattgactttattcctttatccggattttgacaggtggcccaccattatcattaatgtttataacagacaattctaagttctttattttaagccaaaatttgttccgtattattttgaccaatctaatttatcccagttctaatctttcagaccagtgttttctctgattatatgttcttgcaaatgaatgactgaccatcttttggagagtttaagacagcttccttttttttttttttttttttttttgagacggagtcttgctctgttgcccaggctggagtgcagtggagcgatctaggctcactgcaagctccacctcccgagttcgcgccattttcctgcctcagcctcccgagtagctgggactacaggtgcctgccaccacacccggctaatttttttgtatttttagtggagacagggtttcaccatgctagccaggatggtgctgagctcctgacctcgtgatccacctgtctcggcctcccaaagtgctgggattataggcgtgagccaccgcacccagccaagacagcttcttaaactgtctcctaaacatgaagatgcattctcctgaacattttcatgtaagtatctcagttttgagcaagtgtttcactgtgcttcatggatcactgctaatggatcccttgtcttcctcataaccttcatcttgtaatgttataactcatcagtgtactgttagtgtaatgctcagacatggacagaattattctagcactttgagcagtcattcatataggcagtttaatataatgaaggcatttggattttgtggagctgagtcctcatcctggctcctggacagctcaagttatccatggctatttcaatgtcttcacctgtgaaagagacagtgaggctagattaggcctagaatcacacatgtttagagctagagtgaatctgagaatatatagagtttataatactgtcaggtggttgttttcttgagtcacaatataagcatttacatgtatacgtgctgcctttattctggggatttaagcctgatgtttctgtttgttaacgttaaacttttgattctggcaggtattacaatggtaaccttttatcagctctgtagacatgaattctaggtccttgaattttgtagatatgaattctaggccttgagtagctaatataaatattgaataagacatgaccagaacacagcactgtgacacaccactggagttctctttttaggggtgatggcctaatagaaatgaaggtagaatgagcgtatttatttaactacctattatttacctcactaaaatttaaccaacatttatcaaacacatcctaagaaactttattaaatgtcttactgaattaaataaaccaaactcataacacatggtttttgttttctgacatggtattgcctattgataatcatcttattcttaactaagagtttaaaaccaatttgtttaataattaaatctagaattttgctaggaatcagtatgaaacttactcatcattcatgtatattttttaaatgagcaagcattagtgtgtctaggcctttccttctccaagattctcagagattcatctcagtggctaatttccatgagctcttagttatctgcccttaatctgtcctctcctatcttaacgtctgtcttggtctcaagagtggttatctagaattaatgaattaaaaggccttcaatttattttcaaagtagtttgatgccgactataatccaatatgatactgtatccctttgaaacatatgctgggttttggaatatatttgtttattcaatcatccatttatttgatcatttaggacccattttttaccagatactgtgttcagcactagggtagcagatatgaaagagacaaaacatcctttcagagagtagatatgaaatgcttgatggtgttttgtataggacctgtgggaaggaagaggagtgagtacataacgctccctaggagaaggaggggagtttgattaagattctttagtgagtcctgaagcataggtaagagttctccagaacacggaagaggcaaatgaaacagttcattgtaaggtttagagtaagaacaaagtatgagatgtttaaggaaccacatggagtgtcttgagtgacaaaaagaaaaccagtgaccaccagagaaaaaaacaaaaggacttttaaaaaattcctgagtcatagtttcaggcaaaacactcaagggagacaattgccaggaaataacatcaagaggatgcctctgagcattcaggtgatgtcatgtttagctcactcttccctggtagggaataccacctgaccaaaagcttgagggaatcctcttactagaagacccatctgaagccgccagacaaaggattagaggctgatgtccctttgagtcagtgtggcgattcctcagggatctagaaccagaaataccgtttgacccagccatcccattactgggtatatactcaaaggattataaatcatgctgctataaagacacatgcgcacgtatgtttattgcggcactattcacaatagcaaacacttagaaccaacccaaatgtccaacaatgatagactggattaagaaaatgtagcgcatatacaccatgcaatactatgcagccataaaaaatgatgagttcatgtcctttgtagggacatggatgaagctggaaaccatcattctcagcaaactatctcaaggacaaaaagccaaacaccatatgttctcactcataggtgggagttgaacaatgagaacacatggacacagggaggggaacatcacacacccgggactgttgtggggtggggggaggggggaggggggagcgatagcattaggagatatacctgatgctaaatgacaagttaatgggtgcagcacaccaacatggcacatgtatacatatgtaacaaacctgcacattgtgcacatgtaccctaaaacttaaagtataataataataaacttaaaaaaaaaaaagaaaggttcaggctggcttaggtaacaatttaattaaactttttgcttggcatttcccaggaatttctgaaactttctatttttattattcttgcaatttatagaaactgaacatttcaatccagtggaggataatagatgtggcctctatctaggtttattttgctagttaagttcctgaagcaacttaatccaaatattttattttgtccttaattaagaaagaaaagaaagaacatgaaatgtagccatttctttcatgaatcaaacaagatttaatatttgatcatcaagaataagtggtaagtttcttgctttacctgctaataaatggccatggtcatattgaaaaaaaaaattttactgatctaaatttcaataatttactagccagaaacacagtctcttgctgtgatcttgctcctcaaattgtcacaagaatccccagagattctatatgtgttacctctgtgaactgatcagtatgtgagtcaacagcaggccttgctatcattccctcctgattcctgagaagaggagtaagaaatttcaggtataatttgagctggcacctgaaacttttgctatatctctagttaggttgaagtatagctgttgccagatacacgtatacatatagatacatatacatacatatatagagagagagaaagagagagaaagagagacagacacagagataaagagataatgttttgcattttatccaatagataattttttatacgttcatggaacagtttgaaaaatttatgattctttggacaaaaaaaataaaaaactcaccttaagttgaaaagtagacattttgtaagactcattccttgatataaagaataataaagaaaccaatacatgaagaaaacagtcctcaataaccccggaaccaaagagttaatgaaaaggaaaattcataaaaatcaatgcacaagaaaaatactttatataaaacatatggaccatatcaaaagctataatgaaggtgaaaatacatagtgtcaaatctggttattataaagaagaaaatataaaaataatgaaaatatgcttttatcttatataataataataaatagccccgaaacaaaatagtagatgggaattaataaatatggtcactaaaatcaatgaaacagaaaattttaaaaattgtagaagggacaaacaaatcaaacacctgatttaataaatgactaagaaaatgaatacacaaagaattaaattattctattaaggaaacagaaaatagaaaaaagacaagctagaaataagaaaaaaaaatgaccacagatagtagatggacttaaagaattctgagactattgttatatgtgtaatttgaaagaaacaaaaatttgatcacctagagaaaatggatgatttcctcaaaaaatataaaaaattgaccaagaataactggaaaatatgactacactaattactgtggaagaaattggagaggtgattcaaaatctaccattgaataaagcaccaggactaattgggtttttcagcagggttttatgtagccagtgttattttaactattctaggctaaaggaaagatccacagcctccaagaagtcagcataatgttaatactaaatctaattttttaaatataactatattttatttattgttatagatacaagtatttttaaataaatattaccaaacagaattcaaccattcagcaaaagaaaaatcaagtaggataatactatgaagtcaaggtggattcatgttaagaagttatatatatcaacataatacatcagccaattaaagcataaaagttaaatgattatatcagtagatgctgaagcttttgataatatgcaatattcattcctaataagatcttcaagtaaaataggaattgatgaaatatttttactaaaagccagcagcaaatactattcttaaaaagggcaaaaatagattagaaatgaaatatgcagaatttagacttaaggagataaaattgccataaccattacttcacaagaaaattaagtaacctatgtagcactagaaaaaagagataaactacctttttttactaatgagttgactctataggtagaaaatctaagagactttgggagaaaatttagaatttagataccagggatatatttaaaaaacaatagattttgtttattttagccttaaacatctaggaatgtaatgggaaatattccattaatataagtggtaaaagcaataagaattttggaaaaatatgaataagaaagggacaagatgtatacaaacaaaatcaaagggcgtaaaataaaatctaaatgaatgtatgtagatacaccattttctttaaaattataaccttaaaagttcagtaattcaaaattaatacgtaaatgtaatgcaatacaaacaggaattccaacatgttttaaattttgtcttgaagttggtaaaattttttaaagtttatatgaacaaataaataactaaaaatagtcaaaaattttttgagaaagagaaatgtagtaatttagaaatttagggtgaacttgctttaccagacatcataacattctataatgtcatagtaacaaaataaatattgcatcatgtagaataaagatagatagactaaacctgagaatctagaaactggcctcagaagttatgtgaagttaatttaataacttttgtatttttattcagttattcagttgaaaggatgggttattccacaggtgcattggcactaccgagtctatccacgaaaaactattttataccctatataaaaataaatgccagatagatgaaggacttatataaaaatcaaaacaaagcaataaatactttacatttgtgtaatccaggattaagtgtatatctaaccaagatttgaaacccagggactgtaaagtaaaagatagacatattagacatataaaaattaaatgtttcagtggtaaagtcataatcgaaatcaagtaggaaataattgttctgataaaatataattaataggtgaccagttaacatttgtacgttccaaagagtttttaaaagctgagaaaagacaactcaatatttgaaaatggacaaaatgtgtgaataggcagctcgctaaagagaaaaattctaatgctagtaaacatgtgtaaggctcagattcactggtagtcagtgatatgtaatgtaaagcaattatgagatttggctttacagccattagcctgccacctgttgctggatgtgattcaaggacaaaggcattcccatacattgctggtggtaagtgtagagctacagtctcttttagaaagcaactgggtaatatctattcaaaaatgaaaaaaatgcataatctttttacctagaaatcaccttcttgaaaatctgacttatataaatatattacatgcatgtgatggcctttattttttaagtggtataagctttaatacaactcctaacacaaattctgttaaattcaaacatttgctgggttcctagaacagtgctcacagagttggcacacaaatgttataacatagtattacttgttaggtatacaaaaaacaaaccatacagagtttttgccaatgtggaatataatggtgttttgtaggggcagaaaactggaactgagtgagtgtcattaacaagaaaacacctgaatacattatggaacatctatatcatagagtattatagaactactgaataaattaggattctgctgggtaatctaaattgatatgtagaatgtgatgatgagggagaaaataaaaaatgcagaaaaatgtatataatataaccaatttttaaaacaaaagtgattaaaatcctgattgtgcctgtatgtatgtgtgcatctattgtaacttatgatgacataagtttggagtaaaaatttggaaaaatacttacaaacttaaaagttaataacaaaagtctggcatccagaaaaggagtaaaagaaattaaaaagtgagaggagagtatgatttattgtcttacttcagaacttacattatattatatatattcttcatatttaaaaaaacatttaacattcataaattttgtatgtgttttatatttataaacttttaaatttataaatgttatattcataaaatataggtataaatatatatcacattacatacatagatacatgcattgcatatgttcccttgcccatgccaagtcttgcaaagaaaacattttaaaatctgtcctaaaatatatgtttcatgtatttaaggatttatataaaattacaaatatattttaggtaattttttaatttcaagaaaagcacaagagaaatggattaaagataggaaaagcagcaaagtagctgctacaataatacacaaatgaaatgaccaaggagcatgacaaacataatgccaggattgttgccatcattgttgccatcatagcaatgacaatgtgaggatcatggtggaagcagcagcaatttaagaacaaaaatgaagatatagaaagaaaaaaagagggggagttaagaagaataattctgttctgatgcattggtctatttgtctacacttttttatttttattttcattttttgagatggagtcttgctctgtctcccaggctggagtgcagtggcacagtctcagctcactgctacctctgtctcccaggctggagtgcagtggcacagtctcagctcactgctacctccgcctcccaggtcaagcgattttcctgcctcagcctccccagtagctaggattacaggcacctgccgccacacccgactaatttttgcatttttagtggagatggggtttcactatgttggccaggctggtcttgaactcctgacctcgtgatccacctgcctcggcctcccacagtgctgggattacaggggtgagccactgcacctggcctacacttttaacaatacaatattgccaaaatattatagctgatgtttatagtgagtatttagtagggaaaattcctcaccaggctctttaagattatcttgggtatcctagaaccttggcattttcatatcaattttaaaatcaacatgcccggccaggagcagtggctcacgcctgtaatcccagcactttgggaggccgagacgggcagatcacgacgtcaggagatcgagaccatcctagccaacacagtgaaaccccgtctctactaaaaatacaaaaaattagccgggcttggtggtgggcgcctgtagtcccagctactcaggaggctgaggcaggagaatggcgtgaacccgggaggcagagcttgcagtgagccaagatcttgccactgcaccccagcctgagcaacagagcgagactctgtctcaaaaataaataaataaataaataaataaataaataaataaataaataaatataaaataaaatcaacatgccaatttccacacttacatacacacaacttgctgagattttgaatgaattttctttcaatctatagatgtttgggaggaatttaccttgcaatagtatagagtcatccaatccataatatatctatttatttaggtttcctgtattgcctgtaagtaatgtattttaattttcactgtagagttcttacataattttcgttagatttatgactaggtatttgacgtttttgatgctattttgaatacttttaaattttaacttccaattgcttctagtatatcaaaatacattgatttttgtttattgacctgtgtctggccaccttgctttattaactaattaattctaatagttcacagactaccatgcaatttgtgaataaatttctacttctctttacaaatcttatttcttggattttttttcttgccatattttactgactaggacctccactacaatattgaaaagaagtggttatagtgtacattcttgttctttttctaaatttaaggggaaagaattcaatattttatcactaagtatgctgtaggcttttgtagagaccctttcttagaatatgaatattgagaatataatttgctgaattttctttgaatactattcaaatattgaacttaaaaatgctttttccacatctgatgagatggtaatataattttctttctattctgttaatgtggtgaattataatgattgattttcaaatgctaaactacccttggattcctagaataaaattcatttgttaagaatgcataattttttctgtgtataagtggattcaatttgctactatcatgattaggatttttgcacctatgtttataaaaatttaagatttttttttctggtcattttctggtcaaactttgctatcagagttatgctaggatcataaaatgagttgaatactgaataaccccttttcttgtttccagaaggagtatgtgtaatatctgtattaatgtttccttaagtgtttttaagaattcaccaaaaagccacagggtctgaaggtttctttgtgaaagatttttacattatgggtttaattatttattttgattgctttgtttatgtttctcctgaaaatttgaaatttttgctccagtggttataaggagaactacataaaatatagtgaagtttctatttctgcagtcagtgtctattgatttccttccctagaatggctgaattaacatatttccacttcttccatccctgccactctctgatgtcaatgaatgacatatttttagttttaccttggtattgttaatatgcttatctttgttacgtattttggttttaaaggcaacttaagttgattttaaagacaatcttttaacacctcactacaaaagataatggacttaaactacccattattgccaccctctttcctctccttccttctaatttttgtcagatatataattttagcattttttggtattcataatatttacatcctgttcttaagtcgcaagccctaatttttatcttatttttagtcttgtagctaaatgaaacctatgttcattgtcaatcttttgcctgaagtttctgtatcattctcttggttggctgatgtttgcctcctagttttttcacaaaaagttaatgagaaatatatatgcgaaggacatggaagtcccccaaactttgctttcactttatactttaatgacaatttagctgtgtttatagttcttgaaagattatttgtttccttggggacattttagccattagtcttctatcattgagtgtttgaatgttgctcgggagttatctgagattagccagcctaaaacctatttccataggagattgataattttcttcattttaaagaaataattaatgcaaatgtaataaccaaatgtgtaatttaagagctgcatttaagaactggtaacatttgaagaaaaaacattaggtttaatttgggtaggttcaaaatgtctccctacccacttgtagttgggatcagaatacaaagtacacctcaaaacatgtcttttaagggaagaattgtttccttgggtaagataaaacttgaaactgaattcctcactattgaaattttaatagtacaaggttaaaaatggcattcaatatgagttttgttgtgtgggatggttttggaatctttaactgaataattccatttgtttaagtagtgaggtactaactttcagaggaagagactttaagagaatcagttgaaaatgactaatgccaaacatgaaagcagcatcatcatttctttactcattcctcagaagagaaacacccttactgccatccagaggtctatggtccagtggcgagttcagcaacattagcaaagggggtgaaggatgagagatgactcagagacttttcagtcaggtctattgaagagatagcttaatcaggaaaattaggaccactttaaaatgagtatcaagagtggaaagtagagacatgctaataagaagataggacttctgaaaaaaaaagtagctgagtatatatgcaaacagccaggaccctggaacctaagtttccttcaccattactgaacgttttcaaaaattccttaaacttctatttctttgtctaaaaaactgtgaaaattttccttatttcaaaactttgctcagaaatgtctctcctgagagtctttgaaagtttagggcatttaaaaatgcatattattaattttactgagttaatagccattatagtctagtagtgtgtgtaatatatatcaggggacatcttaaaaggcatattatcataaaatgcatatttaaggactttccacctacataaattgaacttaatagattataacaagtctagtgggcccattagggtctttggaaaatacagttcagggccttgttaaaacatatattcttcatgtcatattctacttaaggagcttgcttcagtaacctagaatttgaatatgtttgtcttgcttagtcatgaaaaatgaaaataaagaactctttctttttcagtaagacagtctacaaagtcaggaagaaagcaaattttgccgctaattacattgtttttagtttcaaataacatacatagaaaagtgtcaattaaaataatagctgccagtaaaatgttaaatgacttacacgttttatatatatatatatatatatatatatatatacacacacacatatatatatattaatcctccttttataagtcagaaatgtgagggattatatgtttcagtttaagctgaggttattgattgttagttaccaatggatatacttcaatgagaagcattgggtataaattatgtccagtgtttctcataacgtgatctgaaaaaccacctacatcacaatctcgtgggtgcttaaaatgcctgtttctgagcctcattcctgatcccctggatcagaagtctaggcatgtgccttgggaatttgcattttaataaactctcttagagatggttgcataacaactaaagtttgagagcagttattttaatgtgcaaacctatacacataatgtactaaatatgtgaagccctatctagaacgaacttctgggcatatatactttgaccgcagagtttatactacaattccttaaactttcttcaagtaatgcttattttgaaaccagttctggtctccagtgcccaacttggtcttatttagaaagccactgagctttctggctctaagactgagacatggagctctaactttgtagctgcaattggaaaatgcattaataagatatttgagtgcaattgcccattagaaattctatttctaagattttggatactttttgtattttgtttcattttgtgttgtgttgtgttgtgttgtttgagacagtctcactctgtcacccgggctggagtgcagcagagaaaacacagctcactgcagccttgacctcttgggctcaagagatcctcccacctcagcctcccgagtagctgggactacaggcatgacttttgatattccttaaaaatctttttttgttgttgttcaaaatcaagaggcatcatcccaaaggtgtccactcaaggcctatggatattcagcaatgataactgactcttatctgcagcacatcactagctacaccaacacaaaacaaaacacagcaaaataaaatccttctgtcatgttcatttatcctacagtcttcctcaaagtggaattataaaaaatggaattttattatttactaataactctatgtctaaatttgtttttcctgttttctcattttacaagtgcaaacattatcctcttgactcagtgaaaattagacttattcttgacccagacatacggctatactgaaggaaaattcatcattggctactgagaaggatcaactctgatagctgaaataaatttgaaacaaatctcacactagagacttgaaagtccttaaaacgattgcttggtttcacaaacaacactgtgtttttaacatatagaatcggctagaggtccttatgtgcttgtgaaattttccaaatgtgaaagacataagcaccaccgtttgtatcacagctctttctttcactggcttctaggacttgaatctaacaaaatacctcccagctgtgcttaactgccttgtggggttggttcttgattgttggtaaggattccctgccatgcttacttgggagcctcctaacattcttccttctcctggagagagcccctaatggaatggagttcttaataccagaaaattgcctagaaaatttactcaagtagtgggctttctcaacccagggttacagtaaaagggaaatgtgaaaagtttagaattaagtatgaacatctagttctgacatgggaggaataaactgagtacagcatgtaagaaagataattatttggacccttaaagctttaaaccaaatactctgactcatacaggttctggaaaagactcaaaaatggttcactattgaccctgctgtaagaaacagatctttattttgttttttaaagaagttttaaacaccagattcgaaatgacttaaatatgcaaaagtgcagcattattaccattttctttccccattcttatatgttcattctctaactgcagcctcatcagtggtttactacaccaaaggcagtgaaaaggttacatgtcatttcctgtactcctcatattcactagatttgactataaattccatagtgaattacagcaccaccattattaaagtaatataggccaaaagataagcattacttagtgtgcttagtgcttaggattttgcatgaagtatctgaaaagggtcttctgccctccaccatatgtgggcttttaatagttggcttttccttattagttcccagatgagaaattaataaaacaaatgatcgttgctactgataaataaatgctataccggaatcatttgggaaatcactactgcttatgaaaagacttctagcacctcttatacctttccatgtatcagacaagaaagtttactgagttctgtgctagatgctctggtggaataaaaaggaactagaaaacaacacccacgtgttaagagactgataataccgttggagattcaaaacaaacctcttcccctcctccctcagcagtctcaacttgtcttatcagttcaatcatcatctctcaagaggatggttcctaaatctataacctaaacctgatatctttcctggagtctggtctactttacccaactacctgttagacatctcctcctggatgtcccatttattcctttggttcagcatgttcaaaacaaaacccttctgctttcctttcacatctgcttttcttcctgcatttgctcttttctatttgtgctgataacatcaccatccttctgggctttgcacaggtctgaaacctgtaatttttatgaactcttgcttctcccctcttttcctgtcacatctcatttctcatagccgcccttctttttcagccccatggcatttccctaagttctggctttccttgcctttgcctagattgttggaataggtttctaagtaaattacataccgctaagttttttacccactaattttttcctacataactagctccattactctccaaaaagtacaatgccggggttctactcaaaaagagtcagtgcctcctcaatggctaaaagagcatgtccagacatccctaacttgcccttcgtggtttctacaacctgattctgcctgcctttccaatttagtttcatagaattttcctttttcggaatcctgtgctttacctaaagcaagtaacttgctaatccatatatttgtgccttttcttttacttttcccttgttctagaataacgtccctctatttcttttgatgtagatcaagcttgtcccaaccacggcctagaacagctttgaatgtgactcaacacaaattcgtaaactaacataatgagagttttttacttttttttttttttttgctcatcagctattgttagtgttagtgtattttatgtgtggcccaagataattcttcttccaatgtggcccagggaaggcaaaagattggacaccactgatctagatcctacctaaaacatggaaacttgctcaatagccacagaattagactaaaatttaagagccaatttctagaacagaatggtctaggttcaaaccctggctctcccactttactatgtcaaaatactttaccttcctctactttagtttcctcatctctaaagcagagtagtagtacctaatccctagtgctatgatgaggtaaatgagttaaagctcttagactaatgtttcatgtctataagatcttatataaatgctagacttcaattgtgaatgagtaatttttgccttcatttctagagctttatcttgttaagaaaattctcattgcatatcaaaaagcttaataatgaatgtgtacaaatgatgtatctctttatttgtgagcatgtgaagtacccacttataaagactctggtcctaggcataataaaaaattgttagtatggacaatttcaaataaacacaaaagtgtgcagaataaaatattgaacacctgtatatacttcagctgtcttcaattcacagccaatcttgtttcacttagactccatcttgtattattttgaggcaatcccagtcagcatatgtttcagctattaacagttcagtctgtatctgtaaatgataaggcttttgtttttacataatcattatttcattataacacttaaaatttttaaacataactttttaatatcattaagtagtcatttggtgttcaaatttccaatagtatcataaaatcataattttcgttaacaatttgctgtagtcaggatccaaataagataggcacattctagttggttgctgtgcttttgatggtctcttgatctataattttcctccccctctctgtcattttgtttgttttattacattatttgttaaagaatcggggttgtttgtcctgaagaatcttccatagcctggatttgccaactgcagtttcatggtgtactttaatatgttcctctctcctctgtgtttcctttaaagggtggttagatcagtttaggtgtgatgtttttagcaagactacttcataaattgtatggtggtgtgtgccaagagccacataatgtctgaaaatctttctttttgtgatgattgcagccattgatcatcaatatctaggccaattaattcattcagggtcacaaaatggtgatttcttaaaaggatttattcaattttaactttttcttcctttttctgacttctattttaggtttggggggtacatggcaggtttgttacatgagtaaattgtgtgtcacaggggtttggtgtacagattattttgtgacccaggtaatcagcctaatacctgatagatagttttgttattctgatcctcctcccactctctatcctcaagtagaccttggtgtctgttattcccttttttgggtctatgtgtactcagtgtttggctcccactaataagtgagaatgtgcagtatttggttttatgttcctatgttaattcacttaggataatggactctagctccatccatgttgctgcaaagggcatgatctcattcttttttataactgtgtagtattccatggtgtgtatgtagctcattttctttatccagtccacttggatgggcagttaggttgattccatgtctttgctattgtgaatactgctgtgatgaatatatgcatgcatgtgtctttatgatagaataatttatattcctttaagtatatacccagtaatgagattgctgggtctaatggtagtttgtgttctctgagaaatctccaaactgcttttcacagtggctgaaatagtttacattcttaccagcagtgtataaacatttccttttatctgcaaccttgccaacatctgttattttttgacattttaataatagccatcctgattggtgtgagatggtttcttattatggttttgatttacatctctctgatgatgagtggtgttgagcattttttaatatgcttgttggcctcatgtatgtattcttttaagaagtgtcctgttcacgtcttttgcccattttttaatggggttatttggtatttacttgtccacttgtttaactttcttatagattccgggtcttagacttttgtcagctgcatagtttacaaatattttctcccattctgtatgttgtctgtttactctgtgaatagtattttttgtttgttttttgctgtgcagaggctgtttagtttaattagatcatatttgtcaatttctgttttcattacaattgcttttgtcatcttcatcatgaaatctttgccagggctgatgtctagaatggtattttctaggttatcttccagggtttttacagttttaggttttatatttaagtctttaattcatcttaagttgatttttatatatggtgaaaggaaagggtccagtttcaatcttctgcatatggctagccagttatgccagcatcatttattgaatgagtcctttccccattgcttgttttcgtaagccttgtcgaaaatcagatggttgtaggtatgcatctttatttctgggttctctaacctgttccgttggtctatgtgcttgtttttgtaccagtgccatactgaacttgtagtatagtttgaagtcaggaagtgtgatgcctccaactttgttctttttgcctaggattgctttggctaccaaggctcttttttggttccatatgaattttagaatgtttttctctaattctgtgaaaaatgttgttagtagtttcattttgcacttgtatacaagaacttaaagtaaaatttaaaaaaagaaaaaaaaatgttgttagtagtttgatagaaatagcattgaatctataaattgctttgggtaatatggctattttaacaatattgattttttctattcatgagcgtggaatgtttttccatttgtctgtgtcatctctaatttctttcagtagtgtttggtaattctcattgtagagatctttcacttccctggttggccctattcccaggtattttattctttttgttgctactctgaaagggacagtgttctcgatttggctctcagcttggacattgttgatctatgggaatgctactgatttttgtacattgattttgtatcctgaaactttactgaagttgtttctgagatctaggagcatttgggcagagattatggggttttctaggtaaaaaatcatatcttctgtggtgagagctagtttgacttcttctctttctatttggatgtattttatttctttctcttgcctgattgctctggctaggacttccaatactgcgttgaatgggagcgatgagagaggccatccttgtcttgttccagttctcaaggagaatgcttccagcttttgcccattcggtataatgttggctgtgggtttttgtcatagatgactcttattattttgaggtatgttccttaaatgcctagtttgttgaggattttaaacatgaagggaagtttaattttattataagcctttccttcatctattaagatgatcatgtggtttttgtgcttagtcctgtttatgtgatgaatcacatttagtgatttgcataggttgaaccaatcttgcttcccaggaataaagcctacttgatcatggatgattagctttttgatgtgctgttggatttggtttgctaatattttgttgagaatttttgtgtctatgttcttcaaggatattgacttgaaattttctttttaaattgtatctatgccaggttttggtatcaggatgatgctggcctcataggatgagttagggaggggtccctccaccttagttttttgaagtagtttcagtaggattggtaccaactcttctttatttgtctagtagaattggctgtggatctacctggcccagggcttttactagttggtaagcttttcattactgattccatttcagaactcattattggtctgttcagggtttcaatttctttctggttcaatcttgggaggttgtctgtttctaggagtttacctatttcttctagattttctagtttgtgtgcctagaggtgtttatagtagtctctgagggatttttgtatttctgtggagtcagtggttacgtcccttttgtcatttctgattgtttatttggatcttctctctttttttattagtctagctagtggtctatcaatcttatttattctttcaaaaagccagcttttggttttgttgatcttttgtatgtttttttttgcatctctatttcctttagttcatctcttattttggttatttcttgtcttctgctagctttggggttggactgctcttgtttttcaagttcctctaggtgtgatgtttgtttgttaatttgagatttttctagctttattatgtgggtatttagcactatacattttcccctttacaaaagtaaataacatatatggatagtttgtaaacatcttctcaggcagcaactcaaaataatgtggagatagatgataatgatattatgaagtcaagtttattaataaggaatctgaagctccaaaaagttgtgattttaatgatgttaaattcctagctcttttcatcttgttcactctaattgagtgagaatttttagaaagtttatagaagtattaatgcccaagcaaataaagaagaaaatgctctaatccatgtatcctggtcaaacaaggaacgagttaaagacagcaatgagagtagtgagtcattggacctagtggaggtttgcctatgacgcttgtggagaatttctttctagatctgtcattctcactggattcccaggcaacagctgtgacagactaaattgtctctctcagatgagtataaaatttcatcttccttcctcatcagcaaaatgaaatgaaatggagaattttggaaatggcctgaaatattattgcagacattgctataatttggaaattgtcacatgagtacacagaagatttggcagtttcaagaattcattctggatgtggcaccagttccaaatcagcctatgagaccattatttaaaatgccatcactgtattttaccccagatgattcctgatgatattttattcaggagacatttgtgggagatctgctgtgtgcctctatccatttgcatctgagaagaggaagaccagcctaatgattttcagaaatgagcctatgttagcatatctgaccctgcccacggtgtccccacatcctcagacatcaccttaggcctggcttcaccaaagaggcaccttctagttttatctctctacccaggactttttattcctttgtggactcccttcctttgaaaatcaaatgttctctctctcacatacacactctctctttctttctcttaagactcagctaatctgaaaataacttgccccattatttgtcattcgaaatgtagtacccacaagttaaacaaggtgggagggtgagttgtggcatgccaccttgccaacatgttccattgggaccatttctatggatgcattagtttactgccaggtgttagtatttatagaagttatggcaacagttctatgaatgtctcctttatccctctaccacaaaataagcttctaagaagtctggaaattctgagagtatattagccaatgtgagtgatcactatctaatagtatattttccaaaagcctagctttctaaaagagagtcttgaattttagactgtcatacaaatgtcagttaggtagctttcctgccatagcaattagccaagttaactaggtagccaagacaaggataacttgatgatagatggtttgatttaagtaaaaccgtgtgatttttttttttttttaccaaaagcatgctctgggtaagttagcaaatcaaagcaaagactatgtctttctatctggaattccaacaaccatctaaattctttaattatacagataattttgcatttaaaatttttgaagtagtggactattaactagatcttagaaatggtttgtgaaacttcaataaaagtgtttcttgaaagaagatttgattctcatatatgaaatatgaaccaagttaaatgtacaatctattgatacctacatttgtagttactaaagggaattgagataagctgattttatagagttatttcattagattaagtcctttctctccttggagaaataacttaattaggtatatgtcacaaatgcaattaggtgaggaatcttggccctaattcatttagttgaaagaattacgaacaatttgtgacatagcaagtaggtttttatcaagacagtctttttgagatcagctattcaaaaagcaggggcactggactctgaacacaaatttatctcaaactttatctcgattcatctttgtggcctgatgaggtcatcatttgaaaagaatctaggtgaatataatttataatacagtaccttacctataaattcttctttatctcagtattgacacaatactattcaggtggctttaggagttatttgcttctatctgttaaaaatcacaaaggataataatagaaaaagacatgtatattcggacagctatagaggcagacatgtgattagaatcggacctcctgtttccaagcactagactcaggtcactagatcacaattacagctttatgctttggcttggcagttttgaaaagctcttatttttcttagccttatatttgactgccagagacataatcatttctttaccactcatcatgaacaacaaagcactaaattagtatctagtgttaagatggtaagctacaggtatatttaagttaggaaagaatttcttatttggaaaaagaagttatattttgtaacttcctttgtttaactaatttatataggcaggttagtagtacactatacatgtatttttttaatgtttaaatttaaaacatttaggcaaaggagttttgtctaaaataatattccttagcttactgattcttaataattaatcaaaaccaatatattttaatgatttacattactgaaaaactgtaacataagcttatttaaaacctttaaaaaactataacaagcttatttaaaacctttaaaaactacaacataagcttatttacaacctttaaatagagtctgtaaaacagtacattcagtgaaatctagttttattcctattcttctaccttgttagactgtacataatctctctctcaaaaagacttgtgtgtgtgtgtgtgtgtgtgtatatatatgtatgtacatatatagtatgtgtacatatatgtatgtgtacgtatgtgtgtgtgtgtttatatatacatatatatatatagagagagagagagagagagagaaagagaaccaaaagagaatctaacagagtagaaaaaggagaaggatcactgggaaacttaatgcatatgtgggggatatcaaataagcccagcaaaaagaaaaagcaaagaagccttgagaaaggactgcaacattgaatgccttctccaacccacccacagattgatcagaagtggatggaagccttatggacttgaggtgctatcacagcttctgtccaaacaactagacaatgattaggttatttggacacaggggtgatcccaacaaagccagtttaaaaataaaaataaagagaaaaatgggccggatgtggtggctcacgcctgtaatcccaacagaagctgactctgagagggccagggtctcagatactgaatttagcaaagactttacagaaatattgtaaatctgttcaaggaattagagaaaactctgttcaaataattaagtgaaaatatgacaattactcaatctcagtagagaaacagacatcataaaggaaccaaatggaaattctagagtttcagagtacaataatccaaatgaaaaatttactagctagactcacagtagatttgaggtggcagaaggaaaaatcagtgaacttaaatatggataaattgaaatgatctaaagaaagacgagaaagaaaaataataatgaaaaatgaacagagccacaacattctgtgagacgacatcaagcataccaacatgtatgtaatgggaatcccaggagaaaggaagagagagataaataagagagaagcaagagccaaacacttctgaaatttgatgaaaactattaatttatagatgaaactttagagaactccaagtagaataaacacaaagagaaccacgtttagacacatcataatcaaactgctaaaagccaaaaaaaacagtaaattttaaaagcaataacagaaaaacaattcatcatgtacgtgaaaacacaataagaatatagcaatttcagaaagaatggagacaaaaaggccttagaatgacatactcaaagtgcaaaaataaaaaagagattgtcaactatgaattctgtcttcaatgaaactatcaaagatgaaagcaaaaatgaagacattttgaagcaacaaagtataaaatgaattccttgctagcataaatgaactataagagttgctaaagaagtcccacatgcaaatacattataacagacaattttattttttgcaacacaatttatttatttatttatttattttcccctttccccacaatttattttttaatgttttcattatttcacatagaaacttcatccctttagccaggcttggtgtctcatgcctgcagttctagcactttgggaggccaaggtgggcggatcacctgagatcaggagttcgagaccagcctgaccaatggtgaaaccccatctctaataaaaattttaaaaaaactaaccgagcatgatggtgcatacctgtaatcccagcaactcaggaggctgcagcaggagaattgcatgaaccgggaagtggacgttgcagtaagccgagatcactccactgcactctattctgggtgacagaacgagactccctctcaaaaaaaaaaaaaaaaaaagacagaaaaaagaaatttcattcattagaaagtaattcatcattcctacctcctctcacaccttagttccctcattttattgtgaaaatattcaagcatatacagaaagattgaaagaattgtacagtgaacactcatatattcatcactattctacaatattttgctgtatttgttttatcacatccatacatctatccatctctttgttatgtacttcaaagttgcagacatgagtacgtttcacttctaaaatgttaacatgcataacattaattagagtttatgtttatctttttttttttgagactgagtctcactcatgattttggctcactgcaacctctgcctcccgggttcaagtgattctcctgtctcagcctcccgagtagctgggatcacaggtgcacaccaccacactcggataattgttctatttttagtagagatggggtttcaccatgttggtcaggctggtctcaaacacctgacctcatgatctgcccacctcggcctcccaaagtgctgggattacaggcgtgagccaccatgcccggccttcttttttaattgctaaaattaaaaagaccaggtgtagtggctcacgcctgtaatcccagcactttgggaggccaaggcaggaggccacttgaacccaggaattcaagacaaacctaggcatcaaggtgagaccctgtctctacaaaaaaattttttttaaatagctagatgtcatggtgcatgcctgtggtcccaactacttggaaggctgaggctgaagcatcacttgagcccaggaggtcaaggctgcagtgacctgtgatcgtatcattgcactccagcctgagcaacagagtgacaccctgtctcataaaaaaattttttttgattacatttaaaaacctttttagaaacagggtgtcattataacagacaataatttgaattaagaggaagggatggaatgaagaaataaagagcactgaaatttgtaaatacattgggtcaatataaagcattctacatcgtcatcaacaacaaagcactaaattagtatctaatgtaagctctgttaagatggtaagctacaggtatctttaagttagaaaagaatttcttatttggaaaagaacagttacgttgtgtaacttcctttgtttaactaatttatatatgcaggttagtagtacactatatatgtatttttttaattttaaaatttatttttaagttttacttaagtttcaggatacatgtacagtacagaatgtacaggtttgttacataggtatacgtgtgtcatggtggtttgctgcgcctactgacacatcctttaagttccctcccctcaccctccatccctcaacagcccctggccctggtgtgtgttgttcccctccctgtgtccattgttctcattgctcaactcccacttaggagtgagaacatgcagtgtttggttttctgttcctgtgttagtgtgctgagaatgatggtttccggcttcatccatgtccctgcaaaggacatgatctcattcctttttatggctgcatagtattccatggtgtatatgtacaacattttctttattcagtctatcattgatgggcatttgggttggttccatcactttgctactgtaagtagtgctgcaataaacatacgtgtacatgtgtctttatagcagaatgatttatattcctttgggtatatacccagtaatgggattgctgggtcaagtggtatttcttgttctagatccttgaggaaatgccacaccatcttccacaatggttgaactaatttacattcccaccaacagtgtaaaagcattcctatttctccacagcctcaccagcatctgatgtttcttgactttttaataattgccattctgactggcatgagatagtatctcattgtggttttgatttgcatttctctaatgatcagtgatgttgagcttttttcgtatgtttgttgcccacataaacgtcttcttttgagaagtgtctgttcatatcctttgcccactttttgatggggttgtttgctttttttcttgtatatttgtttaagttcattgtaaattctggatattagacctttgtcacatgggtagattgaaaaaattttctcccaactataggttgcctgttcactctgatgatagtttctctggctgtgcagaagctctttagtataattatatcccatttgttaattttggcttttgttgcaattgcttttggtgttttcatcatgaagtctttgcccatgcctatgtcctgaagggtactgcctaggttttcttctagggtttttatgtttttgggttttacatttaagtctttaatccatcttgagttaatttttgtataaggtgtaagaaaggggtccaatttcagttttctgggtatggctagccagttttcccagcatcatttattgaataggagattctttccccattacttgtttttgtcaagtttgtcgaagatcagattgttgtacatgtatggtcttatttctgaagtctctgttctgttccattagtctatatgtccgttttggtaccagtatcatgctgttttggttactgtagctttgtagtatagtttgaagtcaggtagcgtgatgcctccagctttgttctttttgcttaggattgtcttggctatatggggtattctttgattccataagaaatttaaaatagctttttctaattctgtgaagaatgtcaatggtagtttgataggaatagcgctggatctacaaattgttttggtcagtatggccattttcacgatattgattcttcctatccataagcatggaatgtttttccatttgtttgtgttgtctcttatttccttaagcagtggtttgtagttctccttgaagaggtcctttatatcccgttagctgtattcctaggtattttcttctctttgtaacgattgtgaatgggagttaattcatgatttggctctctacttgcctgttgttgttgtaaaggaatgcttgtgatttttgcacattgattttgtaccctgagaatttgctgaagtggcttattggcttaaggagtttttgcgctgagatgatggggttttctaaatatgaaatcatgtcatctgcaaacagaaaatttgacttcctctcttcctatttgaataccctttatttctttctgttgcctgattgccctggccaaaatttctgatactatgttgaataggagttgtgagagagggcatctgtgtcttgtgcctgttttcaaagggaatgcttccagcttttgcccattcattatgatattggatgtgggtttatcataaatagctcttattattttgaggtgtgttccatcaataactagtttattgagggtttttaacatgaaggatgttgaattttatcaaaagccatttctgcatatatagagataatcatgtggtttttgtctttggttctgtttatgtgatggatttcatttattgatttgcacatgttgaaccagccttgcatcccagggacgaagccaacttgatcatggtggatacgttttttgatgtgctgctggattcggtttgccagtattttgttgaggattttgacattgatgttcatcagggatattggccttaagttttctttttttgttgttgtgtctctgcccagttttggtatcaggaagatgctgacttcataaaatgagttagagaggagtccctctttttcagtttcagaaggaatggtaccagctcctccttatacccctggtagaatttagctgtgaatccgtctggtcctgggctttttttttggttggcaggctattaattactgcctcagtttcagaacttgttattggtctattcatggtctattcatcctggtttagtcttgaaagggtgttttttaaaatatatttatatatatatatatctatttcttctagattttctagtttatttgtgtagaggtgtttatagtattctctggtggtagtttgtatttctgtgggggtcagtggtgatatcccctttgtcactttttattgtgtctatttaattcttctctcttttcttctttattagtctagctagtgatctatccatgttgttgttggtttttttttttttttcctcaaaaaagcagcacctggattcattgattttttggagggtttttcgtgtctctatctccttcaattctgctctgattttagttatttcttgtcttctactagcttttggattagtttgcttttgcctctctagctcttttaattgtgatgttagggtgtcaatttgagatctttctagctgtcttatgtgagcattaggtgttatataaatttccctcttaacactattttagccgtgtcccatagattctggtaagttttctctttgtttttattggtttcaaagaacttgatttctgccttaatttcattatttacccagaagtcattcagaggaggttgttcaatttccatgtaattgtgtggttttgagtttcttaatcctgagttcaaacttgcttgcactgagagactgtttgttatgatttcagttcttttgcatttgctgaggagtgttttacttccaattatgtggttgattttagaataagtgccatgtggcactgagaagaaagtatattctgttgatttggggtggggagttctgtagatatctattaggtccacttgatccagagctgagttcaagtcctgaatatcctttttaatttcctgttttattgatctgtctaatattgacagtggggtgttaaagtctcccactattattgtgtgggagtctaagtctcttttgtatgtctctaagaactcgttttatgaatctgcgtgctcctgtattgggtgcatatatatttagaatagttagctcttcttgctgacttgttccctttgccattatgtaatgcccttctttgtcttttttttttaatcgtagttggtttaaagtctgttttgtcagactaggattgcaaccctttctttttgttgcttgccatttgcttagtaaattttcctccatcactttattttgagcctttgtgtatctttgcatgtgagatgggtctcctgaatacagcacagcaatgggtcttgactctatccaatttgccagtctgtgtcttttaattaggtcatttagcccctttacatttaacgttagtattgttatgtgtgaatttgattctttcatcatgatgctatctggttattttgcacattagttgatgcaatttcttcatagtgtcattggtctttatattttggtgtgtttttgcagtggctggtaccagattttcttttccatattcaatgcttctttcaggagctcttgcaaggcagacctggtggtaacacaatccctcagcatttgcttgtctgtacaggattttatttctccttcacttatgaagcttagtttggctggatatgaaattctaggttgaaaatcctttcttttaagaatgttgaatattggtccccattttcttctggcttgtacagtttctgctgaaaggtctgctgttagtctgatgggcttccctgcataggtgacctggccttctctctggctacccttaatattttcttccttaatttcaaccttggagaatctgataattatgtgtcttggggttgatcttctcaaggggtatcttagtggcattctctgtatttcctgaatctgcatgttggcctgtcttgctaggttgaggaagttctcctgtatagtattctgaagtgtgttttccagcttgtttccatgctcctcatcatcttcaggtactccaatcaatcgtagtttggtcttttttacaaagtcccatatttcttggaggctttgttcattccttttcattctttttctctaatcttatctgcatgccttatgttagcaaggtggtcttcaaactctgaaatcctttcttccacttcacaaagtgtaatgctctgtgtatgcttcatgaagtactattgctatgcttttcagctccatcaggtaatttatgttcctctctaaactggttattctagttagcagctcctcaaaccttttatcaaggtttttagcttgtttgcattgggctaaaacatgctcctttagctcagcgtactttttttttttttttgacggagtcttgctctgttgccgcccaagctggagtgcagtggctcgatctcggctcactgtaagctctgccccccgggttcatgccattctcctgcctcagcctcctgagtagctgggactacaggtgcctgccaccacacccagctaatattttgtatttttagtagtgatggggtttcactgtgttagccaggatggtctcgatctcctaacttcatgatgtgcccgccttggcctccctaagtgctgggattacagcatacttttttattatccatcttctgaagcctacttctgtcaattcttccatctcatcctccgtccagttctgtacccttgctggagagatgttacaatcatttggaggagaagagacactctggccttttgagttttcaacattttttcattgattgtttctcatcttcatgagtttgtctagttttgatctctgaggatgctgacctttggatggattttttttagggacttttgtttttcttgatactgttgttgttgctttctgtttgtttatttttctttcaatggtcaggtacctcttctgtagggctgctacggtttgctcggggttcacttcaggccctattcatctggtttgctcccacacctggagatgtcactcaaggagtctggagaacaacaaagatgggtgtctgctccttcttctgggatctctgacttcaaagggcaccaacctgatgccagtaggattgctcctgtatagggtgtctaacaacccctataggagggtctcacccagttgggtggcatcgggaacaggacctatttaatgaagcactttgtcccttggtggagggggtgtgctttgctagggggaaacccacttgtctgggctgcccagattcctcagaactaccaggaggaatggttaagtctgctggtccacagagactgtggtcactcgccccctgcccaggggctcatgcccagggagatccaggttctgtcccggagcctctggctggagttattggacttcctgcagggaagaactgcccagtgaggaaggatgagtcagagtcaggcctgaagaggctctctggctgcagtctgccacagccagtgtgtcaggctttgggggatacctattgggaccaagccattcagtctcccttgaaaagcacagactgaaaagcccttgaaaagggctttttcagtctcccttgaaaagcccttcccccacccaaggaacttagtgtgttaggcagttgtgagtcccagtgctggctgctaccccttcctcagggagctcaaatggcttagacagtaagccacagctgtggggctggttgcccctcaccctgggagctcagcaggcttaagcagattccagctgagagcctgttgagaatctgcgcagctctggggttgggaccctaagctctggtggtgtgagtttgcgagtgggattttcccatccatgggttgcacagttctgtgggaaaagcatggtttccctggctaggcagcatgctcactcaccacttcccttggctggggggtgagggctcccctggctctcaggtgggctgctgcaccacactgctcttccttcctctctatggatcatgccagtcacctagtcagttctgatgagagaatctggataccttggttgccggtgaaggattcacacgcttattatggttcttttctatgggagcctctgattgccgttgtttctagtcggccatcttggccccatccaaatttttaaatttaaaatatttagatagatgactataattgtatttgtcatgtcatatatttgcgtttgtatagtcatagatatatgactatatttgtatttttcttctaattttttaaaaaatataatgttaaagcaataactattacactacactgttacatttataggatatgaatatattatatatgatatcaatgatacaagaaaatggagaggaaatacatctaaactgaaatttgccatagttttctgaaattaagtcaatgttaactggaatagattatgataaagtaaagatgcatattgtataatcactttaaaaatttcaaaaaaagctaaaaatttatgaaaaactaaaatagcatgctaaaaatatttgttgaacaaaaatgaaggcaggagagaaagaacaggggagcaaaaatgattacacttatagaaataactaaataacaaaatagaaacctttacccaacccaatgttagaaaatatttttctatgttttgttctataatttttatagctttggaatttacatttgtgtccattgttcatttgagttaatttttgtgtagggtgtgatttatgaatcaaagttaattttttgcacatagatatttgccatatcaataattacattaaatgtgaacagaataaatacatcaaaaggtaaagaatgtcagattggattttacaaagcaatatccaactatatactatctacaagagatatggatgagattcaagatacaaacaggttgaaagttaaaggatatatacaaagatgtactatgtaaagagtaaccacaagaaatatggagtgagtataatagtattacacagactctatgacaagtgacattattggagacaggaaagaatattttatataatgataaaagggccaatatagcaggaagatatagcaattattattgtgtatgtacctaacagagcctcaaaatgcatgaagcagagacggacagaaatgaaagacaataggcaattagaaataaatagaaattagaaagaagcaattaacacaattatatttaaagatttcaatactcctctctcaataagaatatagtagacttgaataagcctacagtacactcatctgaactgacattcataaaacactccacccaacaataataaaatacacatttttccaagtgcatataaatcatttaccaagatagactatattctccattactaaatgaatcacaatacattttaaggattcaagttatataaagtatgtttttggtcacaatggaattaaattcgacatcaatattagaaaaaatctctattaaatcttcaaatgtttcaaaatgaaaaaatatgattctcaacaccctgtaggtcaaagaaggaatcaaaaggaaaatttgaaaacattttgagcttaataaaaataaaaacaagtttagttgtatagatttaaatgcttatattagaaaggaataaaaattgaatgttaataatctaagtatccacctccaagaatatggaaaaaagagcatatcaataaccaagtatgtagaaggcaggaacaataaaatcagagtggaaataaaataaaaatgggaaaaaaataactagaagaacaatacagaaaactaataccatcaaaagttggttctttgaaaagatcaacaaaattggtgaacttctagccagactgatcaggaaaaaaaaaggaaagaaaaaattaccagtaactacaatgagggaggggacaccactacagaccctacagaaactgaaaggcttacaagggaatattatcaatgagtttaggctaataaattctataatacagataaaatgtacaaattcttagaaagtcaaaaattaccaaaactgactcaagaacaaatagaagaattgtatagtcctatttcagttgtatacattgtaatagttaaaatcttgctattaaaaaaagcttagattcagatgtctttaattctatcagatgtcttcatctttatttgaaatgagaccaatcctacacataattttttcaaaaatcaaaaaggagggaactcttcctacttcattttatgaggccaatattactctgatactgcaagtcaaagacctcagaaaagtccataggccaatatctctcataaagagagatgcacacacacacacacatatacataaaaaaccacttaacaaatattagcaaactgaatccaataacatatagaaacaattataaaccttgaaagagtggtttaacatttgaaaatttgttgatgtcatgcaccatattaggaaataacaaaaccaatatgattacctcaatgaattcaggacaaaatattttttcaaaattcaatacccattcaacaaattaagaatagaagagcagtttgtcactctgataagagggatttgtgaaaacaaaaattgtgagtattatctttcacttaatggtgaaagactgaactctaagatcaggatcaatacaagaatatccactatcctcatttacattcaatattatcctggaggttctagccagtgtaatactgcaggaaaaagccattaaagacatataaaatggaagagaagaagaaagcccatctttattcttagatggtataatcttatatgtaaaaaattctgaagaatctacaataaaagattacaattcattagcaagtttagcaaggttgcaggaatcaaattgaatatacaaatttttatttgatttccgtatacaagcaacaatcaatcaaaaaaatgaaattttgaaaacaattttatttatggtgatgacctgtacacagatgactaaaaaacattgctaaaagcaattcaagaagacctaaataaatgtagagttgatttgtggtttggaagacccagtattattaaggtgacagttctttagatattgatctatagattcaaggaaatctcaatgaaaatctgaagcatttttgcaaatgcaacaaatttttctagccatcatgtgtaaatgcaaatgacctggtatagccaaaatgatttttaaaaaaataacaaaactgaaggactaatattacctgatttcaacatttatcataatgataatcaaggaagtgtggcatcagcttaaagatagacaaatagacaaatgggaaataatagagtcaaaatgtaaacccacatatatctagacaaatggctttcaacaggggtacaaaaataactcagctgataataaatagcttttttcaacaacccttttatatggttggatttgcatgtttaagaaaaagaaagacaagaacttcaacccatacctcccacattatagaaaacttacttaaaataggtaatagaaataaatgtaaaaaccaaaactgtaaattttttagaagaaaatacagaataaatactttgtgactttaggttaggcataggtttttaactatgacactaaaaagtcaatcaatgaaagaaatagttaaaaatatttcttctttgaaagacactgccaggagaataaaaagacaaagcacaccatgggagaaatattttcaaattacatatatgataaaatgacttttatccagaatatataaatagctctaaacaaacaatccaatttttaaaatgagtatgattgtaatagcactccacacgaaagatatatgaattgcaaataaactcatgaaaagttgttcaacatgattagtcattaggaaaatcaaaacaaaacaaagcaaacgagggaggagccaagatggccgaataggaacagctccggtctacagctcccagcgtgagcgacgcagaagacggtgatttctgcatttccatctgaggtaccgggttcatctcactagggagtgccagagagttggcgcaggccagtgtgtgtgcgcaccgtgcgcgagcggaagcagggcgaggcattgcctcacctgggaagcgcaaggggtcagggagttccctttccgagtcaaagaaaggggtgacggacgcacctggaaaatagggtcactcccacccgaatattgcgcttttcagaccggcttaagaaacggcgcaccacgagactatatcccacacctggctcggagggtcctacacccacggaatctcgctgattgctagcacagcagtctgagatcaaactgcaaggcggcaacgaggctgggggaggggcgcccgccattgcccaggcttgcttaggtaaacaaagcagccaggaagctcaaactgggtggagcccaccacagctcaaggaggcctgcctgcctctgtaggctccacctctgggggcagggcacagacaaacaaaaagacagcagtaacctctgcagacttaagtgtccctgtctgacagctttgaagagagcagtggttctcccagcacgcagctggagatctgagaacgggcagactgcctcctcaagtgggtccctgactcctgacccccgagcagcctaactgggaggcaccccccagcaggggcacactgacacctcacacggcagggtattccaacagacctgcagctgagggtcctgtctgttagaaggaaaactaacaaccagaaaggacatctacaccgaaaacccatctgtacatcaccatcatcaaagaccaaaagtagataaaaccacaaagatggggaaaaaacagaacagaaaaactggaaactctaaaacgcagagcgcctctcctcctccaaaggaacgcagttcctcaccagcaacagaacaaagctggatggagaatgattttgacgagctgagagaagaaggcttcagacgatcaaattactctgagctacgggaggacattcaaaccaaaggcaaagaagttgaaaactttgaaaaaaatttagaagaatgtataactagaataaccaatacagagaagtgcttaaaggagctgatggagctgaaaaccaaggctcgagaactacgtgaagaatgcagaagcctcaggagccgatgcgatcaactggaagaaagggtatcagcaatggaagatgaaatgaatgaaatgaagcgagaagggaagtttagagaaaaaagaataaaaagaaatgagcaaagcctccaagaaatatgggactatgtgaaaagaccaaatctatgtctgattggtgtacctgaaagtgatgtggagaatggaaccaagttggaaaacactctgcaggatattatccaggagaacttccccaatctagcaaggcaggccaacgttcagattcaggaaatacagagaacgccacaaagatactcctcgagaagagcaactccaagacacataattgtcagattcaccaaagttgaaatgaaggaaaaaatgttaagggcagccagagagaaaggtcgggttaccctcaaaggaaagcccatcagactaacagcggatctctcggcagaaaccctacaagccagaagagagtgggggccaatattcaacattcttaaagaaaagaattttcaacccacaatttcatatccagccaaactaagcttcataagtgaaggagaaataaaatactttatagacaagcaaatgttgagagattttgtcaccaccaggcctgccctaaaagagctcctgaaggaagcgctaaacatggaaaggaacaaccggtaccagccgctgcaaaatcatgccaaaatgtaaagaccatcgagactaggaagaaactgcatcaactaatgagcaaaatcaccagctaacatcataatgacaggatcaaattcacacataacaatattaactttaaatataaatggactaaattctgcaattaaaagacacagactggcaagttggataaagagtcaagacccatcagtgtgctgtattcaggaaacccatctcacgtgcagagacacacataggctcaaaataaaaggatggaggaagatctaccaagccaatggaaaacaaaaaaaggcaggggttgcaatcctagtctctgacaaaacagactttaaaccaacaaagatcaaaagagacaaagaaggccattacataatggtaaagggatcaattcaacaagaggagctaactatcctaaatatttatgcacccaatacaggagcacccagattcataaagcaagtcctcagtcacctacaaagagacttagactcccacacattaataatgggagactttaacaccccactgtcaacattagacagatcaacgagacagaaagtcaacaaggatacccaggaattgaactcagctctgcaccaagcagacctaatagacatctacagaactctccaccccaaatcaacagaatatacatttttttcagcaccacaccacacctattccaaaattgaccacatagttggaagtaaagctctcctcagcaaatgtaaaagaacagaaattataacaaactatctctcagaccacagtgcaatcaaactagaactcaggattaagaatctcactcaaagccgctcaactacatggaaactgaacaacctgctcctgaatgactactgggtacataacgaaatgaaggcagaaataaagatgttctttgaaaccaacgagaacaaagacaccacataccagaatctctgggacgcattcaaagcagtgtgtagagggaaatttatagcactaaatgcctacaagagaaagcaggaaagatccaaaattgacaccctaacatcacaattaaaagaactagaaaagcaagagcaaacacattcaaaagctagcagaaggcaagaaataactaaaatcagagcagaactgaaggaaatagagacacaaaaaacccttcaaaaaatcaatgaatccaggagctggttttttgaaaggatcaacaaaattgatagaccgctagcaagactaataaagaaaaaaagagagaagaatcaaatagacaaaataaaaaatgataaaggggatatcaccaccgatcccacagaaatacaaactaccatcagagaatactacaaacacctctacacaaataaactagaaaatctagaagaaatggatacattcctcgacacatacactctcccaagactaaaccaggaagaagttgaatctctgaatcgaccaataacaggctctgaaattgtggcaataatcaatagtttaccaaccaaaaagagtccaggaccagatggattcacagccgaattctaccagaggtacaaggaggaactggtaccattccttctgaaactattccaatcaatagaaaaagagggaatcctccctaactcattttatgaggccagcatcattctgataccaaagccgggcagagacacaaccaaaaaagagaattttagaccaatatccttgatgaacattgatgcaaaaatcctcaataaaatactggcaaaccgaatccagcagcacatcaaaaagcttatccaccatgatcaagtgggcttcatccctgggatgcaaggctggttcaatatacgcaaatcaataaatgtaatccagcatataaacagagccaaagacaaaaaccacatgattatctcaatagatgcagaaaaagcctttgacaaaattcaacaacccttcatgctaaaaactctcaataaattaggtattgatgggatgtatttcaaaataataagagctatctatgacaaacccacagccaatatcatactgaatgggcaaaaactggaagcattccctttgaaaaccggcacaagacagggatgccctctctcaccgctcctattcaacatagtgttggaagttctggccagggcaatcaggcaggagaaggaaataaagggtattcaattaggaaaagaggaagtcaaattgtccctgtttgcagacgacatgattgtttatctagaaaaccccatcgtctcagcccaaaatctccttaagctgataagcaacttcagcaaagtctcaggatacaaaatcaatgtacaaaaatcacaagcattcttatacaccaacaacagacaaacagagagccaaatcatgggtgaactcccattcacaattgcttcaaagagaataaaatacctaggaatccaacttacaagggatgtgaaggacctcttcaaggagaactacaaaccactgctcaaggaaataaaagaggagacaaataaatggaagaacattccatgctcatgggtaggaagaatcaatatcgtgaaaatggccatactgcccaaggtaatttacagattcaatgccatccccatcaagctaccaatgactttcttcacagaattggaaaaaactactttaaagttcatatggaaccaaaaaagagcccgcatcgccaagtcaatcctaagccaaaagaacaaagctggaggcatcacactacctgacttcaaactatactacaaggctacagtaaccaaaacagcatggtactggtacaaaaacagagatatagatcaatggaacagaacagagccctcagaaataatgccgcatatctacaactatctgatctttgacaaacctgagaaaaacaagcaatggggaaaggattccctatttaataaatggtgctgggaaaactggctagccatatgtagaaagctgaaactggatcccttccttacaccttatacaaaaatcaattcaagatggattaaagatttaaacgttaaacctaaaaccataaaaaccctagaagaaaacctaggcattaccattcaggacataggcgtgggcaaggacttcatgtccaaaacaccaaaagcaatggcaacaaaagacaaaattgacaaatgggatctaattaaactaaagagcttctgcacagcaaaagaaactaccatcagagtgaacaggcaacctacaacatgggagaaaatttttgcaacctactcatctgacaaagggctaatatccagaatctacaatgaactcaaacaaatttacaagaaaaaaacaaacaaccccatcaaaaagtgggcgaaggacatgaacagacacttctcaaaagaagacatttatgcagccaaaaaacacatgaagaaatgctcatcatcactggccatcagagaaatgcaaatcaaaaccactatgagatatcatctcacaccagttagaatggcaatcattaaaaagtcaggaaacaacaggtgctggagaggatgtggagaaataggaaacacttttacactgttggtgggactgtaaactagttcaaccattgtggaagtcagtgtggcgattcctcagggatctagaactagaaataccatttgacccagccatcccattactgggtatatacccaaatgagtataaatcatgctgctataaagacacatgcacacgtatgtttattgcggcactattcacaatagcaaagacttggaaccaacccaaatgtccaacaatgatagactggattaagaaaatgtggcacatatacaccatggaatactatgcagccataaaaaatgatgagttcatatcctttgtagggacatggatgaaattggaaaccatcattctcagtaaactatcgcaagaacaaaaaaccaaacaccgcatattctcactcataggtgggaattgaacaatgagatcacatggacacaggaaggggaatatcacactctggggactgtggtggggtcgggggaggggggagggatagcattgggagatatacctaatgctagatgacacattagtgggtgcagcgcacaagcatggcacatgtatacatatgtaactaacctgcacaatgtgcacatgtaccctaaaacttagagtataataaaaaaaaaaaaaaaaaacacatgaaaaaaaaaaaacaaaacaaaacaaagcaaacatggaaatgtttgttattttaattgttatgatggtttcatggctgtttgcatgtgtcaaaactcatcaaatttgtgtacgttaaatatgtgaaacttattgtatgctggttacacctcaataaagctgttaaatttttttaaatttaaaaatattatttcaagaataaaataaccaaaccatattctgggagcaagtatttgcaaattatatatctgataaatgacttgtatcaataatacataaagaacttttacaactcacaaataagaaggcaaactaaaaatggaaaaaagatttaaatagatgattcttcaaagaagatatgtgaatgtctaacaagcagaggaaatgatcattaatcattaagaaaatgcaaattaaagccacaatgaaatactatacatccactaaaatggctataatcaaaaagattgacaaaattggtgagaatatgtggaaatcaggaaccctaatacactgctgatgggaatgtaaaatggcactttggaaactggtttgggaatttcctagaaagttaaacacatacttacctattatgacctagcaattgaactcctgggtatttacctaagaaaagtaaaaatctgtgtccacaaaaagatgtttattttattgttcatggcagcattatttagaatatctaaaaataagaaactggtgaattaataaataaaatatggtgtacccacataaatgatactactcaaaaagaaacaaactacttagccatgcaacatgggtaaactcaaaagcataatgttgaatcaattaagctagacaaaaaaggctacatattgtataattctatttatatgaaatttctagaaaaaagcaaaactatagagacaaaaactatgtcagtagttttctgggactacaagagtgagaagcagttgactacaaatgggcacaaggaaacttttttaggtgatggaagtattttagtcttaggttgtggtgatgggtgcagacctatataaatttactaaaactattgcaccctacatgtacagtgtatcagtattatggcaagtaaatcataccttaataaaactgttagctaaacaataaaaaagatatctatgctggaagtaggaacatgagactcattagcatatagatgatcattgtagctgtaaaagtagagaaaacatctagggaaagtttgttgaaagggaaaacataagaagctgggacagatccctgtggagcagcaacacttagaggatctagcaaaaatgaaaatgagtaaatgcagctacagaggtagaataaaaatgaaggaaatatagtatcacagcaagtaagtatttctaggagggggcttgtcataaagatatcaaatgcttcagataggttaaggaagaaaaagactaaaaggtgtctgatggtggtcacccaagaccttggcatgagcagtttttgaggaccaaataaggtacaagtcaatctggagtgaactgcagagtgagtgggagtaatgaatgcaaacaggagtattgggagcctggctcaagaagtttatctgaaaaaggaaggatttccttccaggtgaagctggaaatgacaggatatagaagtgcaagattttgttttaacagaagattcaacagcatgtttcagtgtggttagaaagaagtgagggagaaaaggctgaagattcagaagagggccataatgagggagcagaaaaagataggattgaaaacacaggttgaaagattaccattaaacagtaaggaataattgttccatgtagaagagtaaagaatggttttaaaataagtgaatttgtagatttcatggcatcaaggaaaggcttgtatgatggcttcttttttcttggtagaaagcaaggtttttgagagtaaaagcagaagtcataataccaaggatttgaggggaatggcactctttaaggacctagaattaggttagtgatcatgaatttataataataccagtctacccaattgtatattttttctctaggaacaagaggtggacagtttgattcactggagttagctccatcagaaagctagtagagcaagggtgtttagagtggtggtaacaaaacacttggaatgacagatcatggatggacaaaagtgaaggcattgggggctgatagacattgtcttcacttgcattcccctgaaacaaggtccgagacaatgactttaggtcaggtagttgatttgagagggagctcaggatacaggagtgacggaatggggaaaataagtcaggaaacaagggaaagataattaaagggtgcatgttttgagctacgtatcattgtgggtaactgcagctgagtcctactggaaatcctctgaggaagcctgtagaatgtgcctggaaattatccctctgtagaacagaaagctgacacattaatccactaattcctgtcaccctttgctggagaattatttctagaagcattaactacccccatttttccaggataccttgccagggctgaacaaactctctggcttcagaaaaatcccagaggcagaaaatgaaaagtaatggggaggattgggcttgaggtgaaatattgacagcatccaaaactccacaggaattttctaccaccagcttcagctaaaagctgaagtagtcctaggggcatatggtagaagatgaaattgaaccagtttacaaaagtccctatgcagtcaaagtaattgaggaaataacttaggataatagatggagttctttgattgtatggaagttattgatatcctctgagctattgatttatcatctgtaaatggggatgagattacccactttgtgtggttactgctagaattaaaagtccttattatgtaaggtgcttagcacagggcctggcatgtagtaaggtatagagaacaaaagctactatattattgctattatctattgaaagattagtaatattaataactacctgcattatggataatagactaattcaaattttatgtataatatttttgaatattatattcaagttcactacttaacttgaaccagtaagttcactacttaagaatataatatttcatatgacaagacattgcagttttgtttggaagaacattaaattctggtactttttgaaattagttttatcatagaatggctattgggaaaatcataaatgtaatctaattcccatgcattctttttcctttggttaggatttcgttgaagtttttattagactagaatgatttattttatttgtaaagaaatcaccacagatgtattgttggttttgttttcaaatcttttctgcttttcaacttattcaaacacaagaaacaatctaaatgcattctactctctacaacctctgatgtcaaataagttttctttaattctagcttaaatctttaatgctgcagttttgtttttgcttattttcttctcagtggagaaaaaaggaacagctggttactattgtcaattttctattgtttggaatttattaaatatgcaacacttgtgaatacatagatatcaatacatatttccttccagatatagaactcctattgcttttctttcaagagtgatagaattttatatgggaaagctttagagttcttctagtcccagtatatagtctgattatttaatactagttaaaatattattaattgccatctagaatttcttgtggtaaattgcctgatgtgttctttgctcaactaccaattggactattattatatttcttatgaatatattgcaacgcaacacaaaatatctttgcatattgatgttaactattaaaccactacatgatattttcccccaatttgttatttgtcttttaattcagttgatagtatttttgccttacaggttcataatattttgtcagatatatatatttttctcttatgaatttctttttttggtttcatgcttagagatgccttactcaccatgagcttttatctaagttcacctatattttcttctggtcctttaatatttttatttttaagttggttttctaatccatccagaattaacttaaatgcaggattgcacatttgttcctaataaatttcaagttgtttattacagcatattgctttgatatgttgtaggattttatatcataaatctgttacatatatattcatgctatatatcagtggttctcaatcagaggtgattttgccctctaggaacatttggcaatgtctgcagacattttttattttccaggactaggggagaggctggctactggcttttagtgagcagagagcaaggatgatactaaccatcctacaatgtacaggactgcccccacaacaaagaattgtcaattgtactgagattaagggaccttaagagatgatagatggatggatgcatagttgatagatcaatagataaatgtatagaagatagatattcattgaataccatttttctgccagttacataccaatagtaatattttccagcctatatttttattctttacctatattctattctttaccctgaagggcattttaagagacattgactcctactttatggaaatccagatacattgaattgttggatatccctggtttgagcacataataaatattgaatgagcgttttataaaaatgacaacaataaatcaaataaattttaatgaaccttatttcactacagtaacttatttttatatgttaaaaagtatgctttttaaaatccattgcggagttttgctaggaatcaattttaagcagtatgtttcttctttagtcttctgccacatctgttattctcttgctatgcagcataaatttcatcagaatattaactctgttctctatattatttttatttagttttattaccactgtcaagcttgcagatttccttgtacacacacatctctttaatatgtagagttgcttattcttaccatctatgagaatcattacttttgcataaagactatatccatttttagttacattctgggagttaatattggtatccatggaattatatgtgtcttctgtgtcaaaaatttctattcactctaataacttatcctgaacatattttgtattggtattaacactttattgtttctgatccccttattagaaagatattttcttctgtgtatttgtgagccttttaattcttattttgcttcctgtcatatttgacatcctctacaacagcaatgtccaatggatggaatttatcgtgatgatggaaatgttctgatctgcacagtctaatatagtaggcatggttgagcacttgaaatgtagctagggcaactgaactgaggaactgaattttacatttaatttaatttagttttaattttagtagccacatgtggctagtggctgctgtatcggacagcacaattctatagagtaattccttacccttccatttttagcttaaaatcctcagctttattttaacttaaacctatttttactggttgtgtttgtatgcagttttgtttgttttgtatattgtatgcgtttcttatgtcccagtgattacgttattttttacttcatttcctatgctttccatacagtaataatacatatccttaggcaattgagagtgtgcaaaggtatttctgtaatgtattatctattaatatcaggtgcttgcttttctttacttttttgcaaataaaatgataatgttcattgtaggaaaaatgaaggaagaaaaacagaaaatataaagaagagaataaggcaaagattattactactactaacttcacagacacacacagacatacgcagagggatacacttggttgagtactttctatacatattcttttatttttaaacaccttactgattgtacagctaatacgtatttatcactagaaaaaaaatttaaaaacaggagtaaagtgaaggaaaaaaatcatctgtaatcacaatgcatagattaaccacttttattactttgatttgttttctcacagtgttgtttctaagacctgtgggtagatggtgtgcaggtaggtaggtagacagctggatatgtagaaaggcattttcaaaaattgtattatactatatgcagggtgggacaatagaagtatacacttttcaggtggcaagaaaacaaaattatatgtcactatgagtatgtatcatccacagtggtattagtgaccattctgaacatttgtaactttaatagaaatatatattggttaacatttatccactgggtttgtctatttattaactgtatcttgctttttatatcatgaacatttttctctagtataaaataaaattcacaaatgtgattttaatggctacgtcataatccattcgttgtctctatatcattaactagtttcctattattggacagttaggatgcttctctttttttactactataaatagcattacactctacatttagtgcctaaaatttttcatctctgattttttcatttctgattattttatctctgattatttcattagtatacatttttagaagtgaaatcactggcccaaatgaaatgaatggatatgagatccttggtatatattgtcaatccaaatcaccttccagaaagttctttgttgcttatagaagaaaatattcttgttccatttttatggtttaatcatttttatgcagctattttttttttttttttttgagatggagttttgctctcttacccaggctggagtgcaatggcatgatcttggctcactgcaacctccgcctcccaggttcaagcaattcttctgcctcagcctcctgagtagctgggactacaggcgcgtgccaccatgcctggctaattttttttgtatttttagtagggacaggtttcaccgtgttggtcaggctggtctcgaaatcctgacctcaactgatccaccggcctcggcctcccaaagtgctaggattacaggtgtgaaccactgcacctggctgcagcttttcttcgaacttttaaacttctgtttggttttacgactcaggattgttttttaataaacgtgcctttcaagggtttagcaaagtaatcatattgttataaatacccaaccaacataactttattttttgctagcaaaggttttcagatataagatttttcattgtataaattgtttctttttagggtgaacaaggagaaaaaggagatccagctctggctggccttaatggagaaaatgtaagcctaactcttttttctgatactctgtttacattttaccactaagatatgctatttaatgctattaagatttgcctatttttggcagagccagccagccatgatccaacaaaattaagaatcatggtgttctttcacatggctcagtagaggcccagtgtttttagtttcatttcattggctttatgtattttctacctgtgcttagccttaacaggcctttctccttgacgtttcttgcttgcaaattttctagtcttttttttctgtcttttttcatcttacatatcttctgccatggcttgtgctcttatcagtggttcacttttcatctcagtccaaatctccatctagtctatagatggcgtctgtattggtaggctttcagtgatgggaagaaagggcgaagtgaagggaaactaactccgtattgctcccctccatggcaccagttccacagcctcagggataacattgcctgtgatatcctaggaccccagtcatcttctccccttcccctcaggatggttatcctcccagaattgcactccagattttaggataaaatttgaaggatggcccaaatgtgggtttcactctgaaatgtaattttatttacatttactcaccatttactatagatttgttatctttactggtaggggaagtgtccaaaatgagaattagtttttccctcggcttccttttctcacttacataaatatgttttggaaaggacctgaagggccacatgacttataaaagaataaggaaaaactgtgagactatatctagctccctaatgccctagatgtgttcagaaacccattttgtatgcaggagatcattacagcggaagagaggctgaagaccaatctttccggcctgtggagaaagtcgtgtgtgtgtgtgtgtgtgtgtgtgtgtgtgggtgtgtgggtgtgtgtgtgtggagtctcccaaaaaagaaagaccctagtagtaatagtagttaatgtttctatgtatgttaactaaaataatagttgtttcaccatcattcttatttctctccctttgaagtgatttttctacaccagagaataggcactagccccagtggcttgtagctatgggagtctctgcatcttctttaccacctgtaatacatcaggacactgaatgtcacacatgtttaaatagagtaactgactcacctcttactcctgtcattggaggcacgtggtgaagtgggatgagttctggagtagaaagccagggtccagtttgtcttccagttctgtcacagaagagcagatcacttctcagagtctgtaaaagtgatggacttgggatagattcttttttttttttttttgagacggagtcttgctctttcccccaggctggagtgcagtggcagtggcatgatctcggctcactgcaacctccgcctcctgggttcacgccattctcctgcctcagccttccgagtagctgggactacaggtgcccgccactaggcctagctaattttttgtatttttagtagagacggggtttcaccgtgttagccaggatggtctcgatctcctgacctcgtgatccgcccgcgtcggcctcccaaagtgctgggattacaggcgtgagccaccgtgcccggcagacttgggatagattctaaagcccctatcgctattatgtgctatgattttatgcaaagagttattaagattataaacttgaaaagtctgacgaggcctgaagcattcattcaggttcattgagtgcctgctacatgtaaggcacagtgagaaaaacaaaacaggaagagatgaagccagagcataggaagtcctggatgtgaggatgcttgtccttcctcctcaggacaaaggggagatgtggcccacactttgtttaaatgaaaattccttttacagtggattctgaaatggatagaatttgggcctttgcctgtgttttctgttctttctattacactctccgtgaaagcaaagaccatgtgttggaatcctagtacttagcacatgtttggggtaagttccaaataactatttgctgaatgttagtttgaaaaactgagcggttattaatattatgacagagtaaaatataagtaattagagtctaagctagaataacagatgtggaagggaagatacagagaatgatgctaaagaggtaaaatacatatgatttggcacttgattggagttgaaaactcaaaaatagcccaacatgttgaccgttctgtgtgagaaggatactaacttgtgagaaatgtaggagtgttcaaacagattaattacagtgttccaaaaaataaccaaactacaagtatgtgggctctctgagatagaggagcaaaacagagtgtattacaagtgcataaaagtaatattggaattgaaatagaaagaggagtttttgaaatatttgaataaaactagaaagatatttgagaggttggaacctgaaatatattcacattaatttcaagatttgaaaatttttcttacattgtctgaaagtaaggtttttgggctttttaattaatcaactgatacatgcatatatttgagggcctactatattcccaaactctctgtcagccactgtgtgagttccaaatctgagtaacactaacttactgagagatcccaaaggcctagtgagcagtgtgaatgtctatccctttgaggaatcttgaaagagtccttcacatgccccaataacaggaggtcattcctttagcaccgttattgtctgatgtagctcattaagtacaaccataaagcatgacaaagcacattaacttttctcacttggttacttagttaataagtagatgatgttattttttccccttaattttgccaaagatattcaggagttatgactaaggagaaataacaaaaagtagtaagagttctcctctttcccctctatcactagtagtaaagaatcagctgcttggttattacactgttggagatggggggagtgttaatattgtgttatagttcataaactattttcacaaggaatttgaaatttgaccctcacccagcttaattggctagtagagtggggaatgatagtattcgtattttcagaagcaagaaattaaaggcttcagaaattaagcaactttcttttttaaaatactaaaattggcctttaactctaaatatttggctgaaaagtctgatcttcccagtaaatcctgccacacatcattgcttatttttcagtgctaaaaaaactgagtctgcaaactaaagtaattcagcgtttatgacagttcactctgactttcaataagcccaggtatacattcttaggaattgaaaggtattataatggctattttgatttgaattaaagtcaagccaatgatggaaatcataacttcagaaatattgtcttagaatgtatggtaaataaactcagtgagccaggtgactccagctactttctaagtcagagtatattggaatgctttaatatttctactaaatgaattccacagcctttttaatagtctttattgctgtgtattatatatgtatcttagtgtcaatgtatcttataataacttattttgtgccagctttctcacaaaatgggccagctcactttggaaagtgtaaactttaatttaaagggtagtatgtagcaattcagtctttctcaatgtggcactcttggcattttggcaagacagttctttttcaagtcagactgtcttgcaagagcagaatgtttagcatccttgaagctcaccaacctaatctaaatgccagtagcagcccctagtcattgggacaagaaaaaatgtgctgatatttttctaagtgtatcttaactgtgtgtgtgtgtgtgtgtgtttgtatgtgtgtgcatgcctaaacttttgtttgatgtctgtggtattactaaacaaatgcatgctcatatgtccattctagtttaaataatgcatacaaaacatatattaaaattttcaaaaatttgaattgctagaaaatttaaccttgaaaatatatgaccttgtctttacacacaatctagtgtataattaaataattttgattgtggcctaatacaagatatatttaacaaaggtatcttagaatagacttgagagagaataatataaagttgtaattgtgatctttaaagccagactatctgggttcacatcccagctctgccactaactagctgatgtactacttggtaaattacttagcctctctgtgcctcagtttctttatttgcaccatggaatgataatttcaatatcctctctgtgcctcagtttccttatttgcaccacggaatgataatttcaatagtacttactgtaggggaaaagataattttcccttcccctctgaggggttcagtcagctgaaatgaactgacaatggacagattaacaggagaaaaggcatacaaatatattaacgtgcatacagtgggagccataaaaaatacgagactcaaagaaaggccagatggttgaagcttaaatagaaccctctttataggaaagaaggagatggggaaatgtaggcaattttgagaggtagtaaactcttttttgaattgaatgggaccaagagctaacaatagcttgtggacaagttacagaaaggtgaaggctggacctccactgtgaacaaaagttgtcttgttttgcagataaagactcccagataatctctcagagctgccctcagaagaatagaccaagagtctgtctgggcatcgtgacaacttttagtttattctcttctccagagattaattttcctggttattctgttagattcctaggaagggggttttaagacaattgctttttttggaagaagatttctcagtctgataaagaaacttccagagagagctcctccctgtacttgaggaggggttggaggaaaaacaagagaaggttagaaagttcttggatctgaggcagcttctaaggcttttcaattccttttaattcaaaagtactcagcatgccaaagcaccacactttggggttatcactctctgtaccccaaaattacctcatggatttttttgtgaagattaaagggactatcatacagaaagcctttagaacagtgtccaacatagggcaagaactatataaacattcactattattagaaaccaagttaaataaaacacatttagctctaataggtacatgtttttatttatttgtttctgtggggttatacaatcttagaaaagtagacttaattgttgagttgtctctttttctgaatctatattatggtcttttaagtatcccttattagaattacagcatctgatgtttctaaaataatcatgttaatctccttataccaatgcaatctgtactagaggatacaaaaatattgaaatcacaaaaccagagataacagctggcaacagctgttgacattgctagggaataacattaagtcattgaaagcttgtgaaaagaattaattgatgggttaaaaatttttaacaaataatatttttatattatcttctgaattttaaagatatgatatcccatgagtagtactaggtactccaacaaaaattgattttatagtctacccgcttttataattctagttataatactgctcttcagcttttgtcttgcctttagataacggtttctgcctccacattacatgtagaatcaactactgtgcttttgggaatctttatgtacatgaatttgattgaaaaccttcataacagataccgatcttactcaatatttaattcagagtctattccatttggctctttatgcctatggtgagtgctgtgtcctttctccctagcactcaataaccattgataggagcaccagtgtgacacaaggagaaaaaccgcatttgagaaaagcattactgatgtgtttctcagaggctattacaatgccatggccttaacaacattgtactttgtcacaggaagacgtgagttacatgggcctactttaatggtcataaaagtagaagcttgacaaatgcagtacttctcaattgcattttatcctatgtgagttaaagcacagttgttacatatccatcaaactggtataaagctgaacaagaaagaactatcagttatcccttaaacttgaacttgaaaagtaaaaacaacatttattaagtgcctaccgtatgctaaatgtctctacaacatatgattctcagaacaacccttcaagaaaactattacttattatacctattttataggaaagcttacccaacttacccatgattatacataaaaggccattcgtcttctgactctgctgaaatccacatctgtgaagtcttggacaccccagtagaattaggcatctgtgggaaatgcttttgtcatacctgctatatacttcaatgataatactcaatattcacatcagcttgtaattggctacatcatcccttcccctcctccctgcccatagttgactgaaccagggagagttacctgattcaactgccaatacattgcttccctagaaattacaactgggattaatttgttggaattaatctttaaaacttttaatgtattattttatacctacaaaataatatatataacatatatgatggttataaatcatagttataatgaggaccccagtgtacccagaactcaatgtgagaactaagacgtcatcctccacttggaatctccctgtgtggttcactatatactgtcctccactccagagttaaccatttttctaaatgctgtacctaatgtttccttccatgcttaaaaattatgtttcacacttacacatttataaggagtatataatttagtcttacatgtttgcagacgttcaataatatttgttgagtaaatggatactcaaggtttttatcagtcatttctttttttgtgtttgtcttttctctgcatagttttacacaagcaaaaagagaaaacctttttttaataaatttctctgctcagtgaatgggataacttcctagccagttacttaagtcaaatgcaactcagcctggagactttccttcttcttctccacttctggcatatctgccagtcttgcttccagcatgtgccaactctgaccacttctcatcatctccactggcacaagcctgtcccagccatcctgctctctttcctggaaaagctgtcatagccccttttatgctcccactcttgctgcccataatttgtgttccacgttgctgccaaagtggtttgtggggatttttgtaaacatattcacatcatgtcattttcctgcttaaaacacttaagtggcttcccattgcatgtagaacaaaacccatcttcctcatcatggcctgcaattacttatgtaccatgacccctggcaaaccttgacttaaccccctactccttacctgtgtgctcatgacactccttttatcttagtgacctctgtgcttctttttccctctgcccccacacagatcattgcgtggctggatcctttttttttttatttgagcaaattcatgaggtacatgagaatttttttacacatgtataatacatagtgatcaaatcagggtgtttaggttgtccattttccaagtgcaatacattttttaaaagtatgcttatcctactctgctatcaaacattgaatttattccttctaccttactgtatgcttgtatctttttatccacttcttttcatcctcccttgccccctcactcaccctttccagtctttgttatctatttttacactttctacctccatgtgttcaaattttttttgctcccacatgtaagaaagaacatggaatatttgtctttttgtgcctggcttacttcacttaatataatgactttcagttccatccatgttgctgcaaatgacaggattttgttttcttatggcttaatagtactccgttgtgtatatataacaccttttctttatccattcatctgttgatggacacagaatgattccatatctttgctaggatccttctgaaacaacaaatgtcaccaccacacaaggaccatttctgacaccccccttgaagtagcaactctctcctctttcacttttatcacattcagcctgttgacctgtttattgtcagccactcacctcttattacatgagttccttgaggacgggaaccttcacctagttaaagaaaaaaatcgttgacacttgtttttaaaaagcgataaggaagacattttattccagactattgcaataggggaattgcaataagggagacagatcaggttcaactctaactacaacaaggacaggtggggatttatagccaatgagtagagggagggatgtcactggatagaaaattactaagaggagacatcaagggtagggtgattcttaccaaactgatctaagaagattcttgctgaagacaggccaaagacttagacatcaagttagaggatgaagaacttgatcttctcaaaagtaaggaatggagaagagattttaagggtgagagattctctctaaacatacttagcaagattcttgctataactgagctgggaagaccaaagacaggatgggggccatggtccaggtctagctgagaagagggctcagagaaccatgactaaaagtttggtgatggagagaatcttcattaatttcttgttcttttctgtatctctaaagtcgtactaatcaatagaaatataataagagctacaaattcaagatgaaggcaaatatattatttttttctagtaaccaaattaagcaaaataaaagggaacaggagaaaatacttttaataatatgttttatttaatgcaatatatccaactgttatcatttaagcatataataatttaaaaattattagtgagatattttacatttttttcttatactaaatattgtaaatctaacagtgttttatattcataatacacctcaattcagagtagtcacatttcaagagttcgaaagctacatgtggctgtggctaccagtacaggtctaaaggccagaagcaacttcacacaaggtatataataaatgtttattgaataaataagtgaaagaacaaatgaattaataataaatctattcacagaaatggcaaatttcttccttcaagtgtttacaatattctgtttccaagttctactctggaaacatgtataaatagagtatgcgttgcttgatttgggaagaaatggatattgtaaataataagacaatactgtatcacatctcaaatatcatttaatttttcactcatcctttttctataaatattccaaggtaatgatggaaaaaataataactatgagttttatacgtgaaggcatttatgcaactagaagttttttttgccaattaggtattgttttcatccattaaaaatgtttttcttaaagtataatactacaattttcacacactgtctgcaacaggattattttaagtatctaattttcttttgtttctttcacttcatcactggtgtctatgttgagtacaggtgatggcatttggcattatttattcactacaaaatgtcagggcagtaatagccgggtctttcagctaggaacagtaagacacttagacttactgtgcattgtgtggcttcagaatacttctttcttctattattgttcttccttcatccagtgtgttaaactaaggaaaaaagaagttttttttttctatttaccacgtagtcaggatgtgtctatctaactttctacgtacactgtgaattcatgcagctgtagagctgatctcctctggtacaatctattgtggaagtctcaaaagctgtcattgcttagtcagatcaactaaatacccattaaaacatccaacagtccagaggacttatgaaaatatttatctgttattctgtatatgtcatatatagtttcatttgacatctttataaatccaagtaaaaaggaattagagaactaaaatatactttaaaacaggcaagagattacattttagctccagttgtatgatagcaaaagaatacatctttcattccttttcccctcacaattagatttcttgatagagacataaaaatgtttttgattttactcttgaatttttttggcaagcttaacaaaggccaaatcaatgctaaatcagaggtatttacaacatccacaaatttaatccaaagtggatacttaaaacctcatatagatctaaatgatattctcccagatggtgaattaatgtaattttagcaggaagcaaagttgcacaaatatgcagtattgaggactcgcgctgatttaatgtatctgtgcccaccacggcacagatgttgcttatcattttagtgccagttgtctctatttctctctatactacaaaaggaagaatgagatttggaggttcagtaaattatgatttattttgttactaatgacttgttagaaattaaagctttctgtgaactgtgtattggttatattctttctacagggtttgaaaggtgacttgggtcctcatggtccacctggcccaaaaggagaaaaggtattgtgtttacccagccaagcccaacctttctttaagaaaactctgacaacctatgcagtgacttctcattcatactgtttatctcctaaaagcattctaaaattaaccaaaagctgttaccttaatagcatctgaataagaacagcctttttgttcatttaattagtttgaaaagactaaatgcacaattgctagttgacattagcttgtatttataagatttcccttttctcacccttgcttaacagcatgaggtattcaatcatcaaattagcaagtgtgacctgtattggaaaactttgccaataacactgagctgctgccataatggtgaggcaagtggcttttggaaagaagctagttttgtatctcagtcttaatttaactattccattttctgccactttttctcataaaataagttatttcataatgacatgttggcaatgatcttgaaaaggaaattaagaaataggaaaaagcaagggttgttttgaataaagtagttgggtgatcccagtttgatgaaaattgtatgtatatgtgttttgcaatgcattttgttctccatttttagcacatttagaaatccttgtctatcttcaatatttatctctgtgttaaaggtgatcctgcaaatgagtccccagtgactgatttaagccacttcagtgttcccttagcaactgttggctattttaattcaattgttccaaaaaacaatgaatacacaatgctaagttttaacttctgaggtggctatattggttgagaaaagagaaagtcctaaagatactcaatgtgagactacagcatcctggtaccccacgctatacagtacagggcttccataatgtgcagctaaataagaaccgtggaaaggatgcgtggtctttaatgtttgagagttcttaagaaataaataaagttcctgggaaagtaaacatgaaggtgacatagaaattggaaaatagtgaacttttagatgaaccattttttaaagatgttgaatagtttgttgatatatccacctggaaatttgtattcacatagatcagcaaagcaattttagcgttcagaaatacataaatataggcaaagcctcttacagttgatggcaaatgcaatgccaattcagcagagctttagaagaggccatgggactgcttcttgcagctgggaagcatgaaatggggagatccacttattatttctgctgatcttcatactaactttgtcagacaaattatctatcgccgtgacacttcccagctgcttcattggcaagtaaacatacttgaaaatatattatttctaattttggattagtagacaaaagaatagaaaattagattattttcgctttcaaaacaagtcctgctgttgcaaaaagcatagagtatacaaggtgatttttatatcatgaaagctaaaagggacatgatatattttctttatgcagagacttttatcaggatgaagttctatttttctattcttcaagatttatctctatatattgcttctatccacctagaaatttataaataatgtgcaaaaagggactagtggtaattgtagcttttctttaatctattttagggagatacaggacccccaggaccaccagccttacctgtaagtattcttgaaatcaaaattcaaaattgaaatccattattctgtttattatccatattacatcatgactaaaccagaatttaagtcacagagttaagaattgaaggtgacttcgagtacatgtagtcaaacctccacattttaaagatggggcatctgcccacaacagtgaaatatctgacccaaggtcatacaggtagttacaattaaagtctggaatcagtacctaccctgagcaatttcctctatcctccatatggctcataattttgtctcctaaatgtttgattatgcactcttaacatcaggtttaatgtaaatggaatcagatacagtcctacttgctttaaaaactgtaaaaggacaaaacaaactctaatcacccagtgaataaaaacagctacctatttaaactggtaattacattctcccaacactttccaaaatcattgttattttcctctatgatttgattctaaaatttgcagatgataaaattgcaatattttagtgacagatttatgagaaaagtttatagtgtgcacataatgagattgttctcaatcaaatggtacatcatgtattaagcactttataataaatatatgattctcttatattcagatacaatttactattacagacttttttcataggtgattaaagattcttatttaacttaaataagactctaagcctaatggaaaagaggacagttttgttttgttttttttaaaaaagatcttctatagcctgaagtcttttgaattttatgttgatgttacctagtgagataaattaagcatttaaatcagtagtattcgaagacctattctgattatagaaggtcagatttttaaaagtattctagtaatctgaatggagcccttcccataggtagaacataggaatctcaaaaactgtgtgattttgataatatttatatttatctttgtacttaaaaatcccattatgaaaaatacattaataatgtcttacacaaataattgttacaactcccacataaacaaatgttttttgatatgtggaaaacctaaggaactaaatagataacttacttggggataactcattcaatttgcagtggaagtttatgctttaagcttttattttaagcatgaaaagaaagactatttttttgagaggaggttttaagtgcatattattcagttttttatactttgtagaattttattttattttattttttgagacagagtcttgctctgtcacccaggctggagtacagtggcacgatctcggctcactgcaacctccgcctcccgggttcaagcgattctcctgcctcagcctcctgagtagctgggactacaggcacctgccaccatgcccggctaatttttgtatgtttagtagagacaggttttcaccatattgatcaggctggtctggaactcctgacctcaggtgatccgcccacttcggcctcccaaagtgctgggattacaggcttgagccactgtgcccagccttacactttgtagaattaaaaaaaaaaaattatttagcagtgatttagttaaacctgctctttttacttaggacagatgcctgtttctctttaactaagttacatgcagtcatttagttaaacctgctcattttatgtaagacacatgcctgtttttcttcaactaagttatatattcaactactcagttatctgatttcattgtcattttcaactcatgttggaagactgatatgcaatctacatatattatttcgcctgaaatacaattttggcttctcaatcagaaaattgtattggattacatatattttgtggatgtttaatagcagctagcttctttctgccaaggaacaccttgaagatacctctctgcaccaattcatctgtcaagcacttagagattacaagctaatttcatacttgtctaaaaatacgacaaggaaaaaacactatgaaatgaaatgttttatttcataaagtaaaatattcatattattggggtattactattttgtatgcttgacattactttctttattaatataaattatcaactcttccctacaaaatagggataaactaaaatgaataccaacttacaatacactaaatatttaattgatcttataatacaggttggtacattattagttgaaataatttataatagtctttgaggaagcccaaatgactaactgcgttatatttggattaaatgaggcagtgatatattggagtcaataaacagagttcatccataattgttctcaaaactagctccacgctaaaatctactgaagagttaaaaaacttaaccaatattggggctccacccccagaaattccaattcaatcaacctgatgtgggaccagtatattttaaaagctccccgagtggatctaaatatgcagcaagagttgagaaccattatttatgggaactagaatggaaaaagctttcttcctactcaaaaaaattatatcagattgttgaagaagtccaacttccatttgaaatccaacttaatacatagcgataaagaactatctctttccgttagggaggcatactagtaaaatgaagttaagattgaaccctgcttcattaaatggagagaattagggctaggaagatacctttaattacaaccttcatctaaatgtccatgtactcctgtggcttgggtgcctttcatgcttcttaaaatttaatgtatgtaggaacactcagggtcttgttcaaatgcatatttttattcctaagtctgaggtgagatctgagcttctacatttctagcaagccccaagggagtcagatactactggttgttgcactacactggtcacaaaggcttagcaccctcttcccagttagctgccttttcccatagatcaatggttctctgtcgcatcctggccaacatggtgaaaccctgtctctactaaaaattagctgggcatggtggtgtgtgcctgtagtctcagctacttgggaggctgagtcaggggaattgctcgaacccgggaggcggttgcagtgagccgagatcgcgccactgcactccagcccagctggagacagagcaagactccgtctgaaaaaaaaaaaaagattaatggttctctatcttgactgcacattggaattacccaaggtgctttaaaaattctaattcccagactgtaccacataccaataaagccagaatctccagggagggactcaggcaacagttgtttgagatttttcccaagcagttctaatgtgcaggcacgctcgagaactaaggctctgaaagcatgtctaatacttttctttacagctttctcttacagatcttgagcaaacattttggaattactcattacactagtatttatatcaaaaacacccaacctgattactttcaggagcttccaggagaggccagccttcctagtcatacctacaatttgcttcctgattacttcattatagaggatagatgaacgtccatctccacatttacaagctactagcaagtccaacagtaatccttcttgagaaggacaacaagcattgacaacttcaggacacagaattccagaaattctcaaagcacacacagctgaactgcccagaataactaagggcgaagagctgaacactttttccccctctaagccatacattctatatttgctttacttttattcatattttgtttaataagaaattaagagaaatagtaattgagcacactgtaatactgagtttactgatgcaggggcaatcctttatgatgtttttggggaagtattgttttttttttttttcttttgagacagggtctcactctgttgcccaggctgaagtgcagtagccccatcacagctcactgcagccttgacctcatgggcttacgtgatccacccacttcagcctcccaagtagcagggactacagacggttggcactatgcccagctaattttttttttttttttaacaaagacaaagtcttgctatgttgcctaggctggtcttaaactcctgagctcaagtgatcctcctcccttggcctcccaaagtgttggaattataggcaggaaccactgagtccagctgggattatgtttattgctgttatttttgtgtccctgtggattcttgtgcttttggtacttaaattttttttaatcacatagaaccagttcatcaaaaaaaatctgatatgtaaaaccatctatttcattaaatgttacttttgttgcttatttatactttcttttataactcgttgagtctgtatataattgggtctcagtggaagagagagaataaagaagtgagggtgaccaagtttaaaaaggagtaggaaaggtaaaattgaggaaatggcgtgaaacacagactggagtcctagaaacagtttgatttgctaggttcagctacaatagcttttaccctttatttcacctctcccttcctatcacctgaaagtattcttactgccagtgaccagtgcttcctcactctctaatatataagaaacctattaataagaaagccaaccaaaatggtgctgcagtttcaaatgcagtttgcaatatacccctttattatttcaggaaatgggaccccattcaaaattccacagttgaatccctttgataacgtttgaatccttctatagattcatgttcacgggtcatatggaaaatactccaatgtgactgccttggagaaaagaaaaggaaaaaaaataataagagaaatctgaggcctgtaaaaatgtcatggagattaaagtgatatttatggcattaattgtcacttacatcctttaacctttaaatattctgtcaatctacttgacttgataaaaatagaattatactttttgatatgacgttaataaacttgcaaatcttattttgtagactttccagattattctaacaataaaagatattgaaattcaagaacaaatttgtgaatctgtaagtggaacatctggaaactattttgtaaaacagtgtccaagaggcttcccttaatactttttttaaacaaaatttcatatagagatacggaaaaaaagaaatgaaacactttcagcccagaaggtgggaatgtggttgaattacacacacaaaaaagaaagactaaaaatccatggttgccaccataaacccaccttcatgtatctcttgctaggaatattttcagcaaatacagctagttgaaaataaaaaatttaatgaaatatctgatttcttttcagccactttttggaagataccaaattcactaattagtttggtactaacaactattttgttaacacaataagccattatagaaacttataataattttaaagttctaaagaaataaatatgagattcttcaacttgatttaaattaattaactgattattccacccttatcctttttatatttcaaactgataaccattttaaaaatagcacatcttgttagattttaagtaataataatataaataataaatggtagacatttattcagtgctatgtattgtttaaaccaaaccttaaacaaccctgtgaggtataaaatgattattactacatcgtacataagggaactgaggatgggaatatctaagtaaattgtccaaggttcacagatgttacataacagagctaatattcaactgcccatttggctgactcttaaaacctaagctattaaattctgcaagcattatttaaatctagtttaaaaaattataaaaaaaacagaaatgttctaaactattgcaaaaattaaaatttttaaatcaggtcaggcatggtggctcatacctctaatcccagcactttgggaggccaaggcaggcagatcacttgaggtgaggagtttgagaccagcctggtcaacatggcaaaacctcatctctactacaaataaaaaaataaaagtaaaaaaaaaatagccggatttggtgatggatgcctgtaatcccagctactcagggaggctaagtgggagaattgcctaaacccaggaggaggttgcagtgagctgagattgcaccgctgcactccagcctaggtgacatagcaagactctgtctcaaataaaataaaataaaataaaattttatcttgaagccaaaattcagaaaaattcaagtgcctagcagagatggggtggaaatgtaaatgtgcgatgcagcccagtgtaagataatagagtgtgcttggggttagggaccaggatagctatgtttatctcaaagtatcaaattcgaattaaaaactacttagagattgcctaatgcagaatataggcatactttggagatattacaggttcggttccgtaccactgcaataaagcaagtcaccaattttttttgcttttccaatgtatataaaagttatgtttatattataccatgtcctataaaatgtgcaatttatattatgcaaaaacaattttacacattttaattaaaaaatactttattgctaaaaaatgctaatgatcatctgagccttcagtgagttgtaatctttttgctgtggagggtcttgcctccatattgatggctgctatctgatcagggtggtggttattgaaggttggggtggctgtggtaatttcctaaaataagacaaaaatgaagtttgccaccttaattgacttttcctttcatgaaagatttctctgtagcatgtgatgctgtttagtagcattttacccacagaacttcttttgaaattggagtcaatcctctcaaatgctgctgttactttatcaactaaatatatataatatttcaaatcttccttgtcatttcaacaatgtttgcagcattttcaccaggagtagatttcatctcagaaaaacattttctttgttcacccataagaagcaactcctcacttattcaagcttaccatgagagtgcagcaattcagccacatcttcaggcttcacttctaattctagttctcttgctatttctaccacatctgcagttacttcctccaattacatcttaaacccctcagagtcatccgtggggtttggaatcaacctcttccaaattcctgttaatgttgagattttgacctcctctgtgaatcacaaatgcctttaatggcatgtagaatgttgtttttcaatttattttgcccaggttcatcagaggaagcactatctatgcagctatagccttacaaaatgtatttcttcttcttttttttttttttttgagaaggagtctcgctctgtcgcccagactggagtgaagtggcgcgatctcggctcactgcaagctccgcctctcgggttcacgccattctcctgcctcagcctctggagtagctgggactacaggcgcccaccactatgcctggctaatttttttgtacttttagtagagacagggtttcaccatgttagccaggatggtctcgatctcctgacctcgtgatctgcccgtctcggcctcccaaagtgctgggattacaggcgtgagccaccgcgcccggccacaaaatgtatttcttaaataataagtcttgaaagtcaaaattactccttcacccatgggctgaagaatggatattgtgttagcaggcatgaaaacgacattcgtctccttgtacatcaccatcagagcccttgggttaccagatgcgttgtcaatgagcaggaatattttgaaagaaatatttttttctaagcagtggtatcaacagtgggcttcttcagtaaaccatgctataagcagatgtgctgtcatccaggctttgtcattccgcttatagagcacaggcagggtaaatgtagcataactcttaagggccctaggattttcagaatgaggattggctttaccttaaagtcacaaactgtattatcccctaactagagagttagtctttcctgtgaagctttgaagtcaggcattgacttttcctctccagctatgaaagtcttagatggcatcttaactgctttgttgacattgaaaactcgttgcgtggtgtggttaccttcattgaagatcttggataacttgctgcagcttctagatcagcacttaatgcttcactttgtacttttatattctggagacggcttctttccttaaacatcatgaaccaacttctgctagcttcaaacttttcttctgcagcttcctcacctctctcagccttcacagaattaagaggcaagggcttgctctggattaggctttgatttaagggaatgttgtggtttaagggaatttgtggctatttgggtcttttatccagatctttaagtctttcttcatatcagcaatatggctgttttgctttcttatcatttgtgtattcactatagtagcacatttaatttccttcaagaagtttttctttgcattcacaagttggttgtttgtctggagggacctggcttttgcattcacaactcggctgtttggctggagggacctagcttttggtgtatctcagctttcagtacactttcctcactaagtttaatcatttttagcttttaattgaaaatgagagatgcgcaactcttcctttcattcgaacacttgaggccattgtatggttattaattgacctaatttcaatattgttgttccttaggaaatagggttgcccaagtagagggagagagacagagaaatggctagtcagtggagcagtcagaacatacattctctctctcttccctttctgaaatgccagtggcagatatgttagatttttgataatgtccctcttgtccataaaactctgttcatttttttcccatctaattccatcttcttgggaatggatcatttccaataagcccttatcaatcttactcttgctttgttaatttccattctgctgttaagactatcatgtgaattttttagtatagatactatatttttaagctagtgaagtttattttatattaaatagtgtctatttctctgctgttatttcctatcttttcattcattatgagcatgttttccttcctgtccttgggaatacttttaatagctactttaaaatctttccaggcacggtggctcacacctgtaatcccagcactttaggaggccgaggtgggcggatcacctgaggttgggagtttgagaccagcctgaccaaaatggagaaatgccatctcaactaaaaatagaaaaattagccaggcatggtggtgcatgcctgtaaccctagctacttgggaggctgaggcaggagaatcacttgaaactgggaggtggaggttgtggtgagccaaaacataccatggcactccagcctgggcaacaagagcgagactctgtctcaaaaaaaaaaaaaaaaaaaaaaactttctccgatcattctgtcatctgagtaatatcaagtagttctttgttgattgtcttttctccttagaatgggttatgttttggtgcttacttgtatggcaagtaattttttattgtattttggatactatgaatggtaagttacaggaactctgaattccattttttctgaagagctttaatatatttttaaggcaggcagttaaattggcttgactcgcatagcaaactctgtttctcctacagctggcaacagctgaaatccgttttgttcttttaagctaagctgagctacttgcagtttgcactgtgtatgtttggttaggagtcagccagagatttggggagagcttatacgcagaattttggacttccttacttatttcaggatttgacaaaccaaccccactttactttacaggaattgcatttgccctaaactctgtcctcagatttttcaatccagcaagtctgtaggctttctatttagctaacccatgacccagacttgagcctgtcctcagactaaacatcttaaaaacagaaaactgactccatgctgtttaatttttccaaatgttgactcccctccagtatctgcctgcttttgatgagtttccagtgtcttcaggtagttgttctacatgttgttcagtatttatagttgctatctgtgagcatgttgatttaatataactactgggccatcctggaagcccatttttgtaatacaatgctgagtaacttataatttacttagatatcttgctcctgtaaacataagtgagttagccttcacatttctttacttattctattgaccttgccttcaaaaaatatctagaatctgaccaattctcacacctctgctattactacttggtcctagttaccattataaatctcttgattttttcagtagccaattaatggtctccctccttctccccttgctcttcttgcgtgatttacacaagaagccagaatgttccttgtcactcttcttttcggaatctccagtgtttccccaggtaattaaataaaacccaaattccatacaatggcctacaaagtcttacaggattcaactctcattgcatttctgacttcatctcattttcttctctttctttctgattttactccacaacaaagtaatttttccagaaaattatccaatattcaatttttttttaatgcagagtgctggccaattagaataaatggattgttctgattcagtgcactggtgctgtttgtattttcaggcttacagtgaagaatgaatgactattaagttttaattcctgtgatttgtctaatgattatgatacaaagtttaaattaaaatgtctttaatctatagttgtagattttaccatgtcttgccttattcattttttcatttctcagcaacttgttaaactcatagatggtaaaatttagcattctaatcataaaaatgtgaaataacttgctataaatttgagacttatggtttcaacagcacaaatgaagccaaatacagtcaaataatgcagtgattcagctgaaattctctaagcaactgggttattaacaacaaagaaaaattcccttataaatatgtttttcatatatatgtaccaactttttgaaattccacgttttaaaaatatcaccaaatcacattttttcaaaaggtatttgggttctaccacatctggaatggccatattgctaatatcattgtcacgtattgagttgcagtaatgatggattagaaaaggcacttttgaataacctgttaaagaataaaaattccttttctaaattatttaaaataaatatgttaacaaaactatattcagaatcagcattttttaagatactgtattctgattgtgagaaaactaaatacttaatgtcaagatgacacttaaccagtgagttactgataaacttaaattatctcttctgttgatatttgtaatttacaaggcagatatacgtgagctaaaaccaatgctgaataagaaaaatgtgtttatcataataagtatacacatttatttgatcaaatataatgtatccaaggtcataatgaaaatctgataaattattctgaaatatgaagatgttgacataaaaatcctctattaaaggtaaatatttcatggtttaatcatgttatttgaaaaattgcattttatattagcttttcctcctcgtgttgaaatattagttgtaaatcattacattcaaatattcaagtacgataagcacaaattctttggttatatgtcatctgttgttaaaaccttaattttatataaatgtagtgtgtctttatatgtaacttcacaaattgtgtatgttctataaccttcctattacatactattgccagattctcctcaattaaataatataatcctgtttttacagtaaagttttactgaaatacattactaaggcttcagaagcaagacagggactatgagtgaaatgagacagttggctaacatctctatctccttttctcttccagtctttgcatgtcatgtcagaggagagacaggtgaaggaaggtagaacagtgctatttcatgtaatatatccactaattttagttcctaggaaaatggctgtgttgctctggccatgtctctttgggaagttattaaatactcatccagatggcaccaaatgtttatgcagaagccaaaggttaagtctgtcaacagcagaagtgccttagacatgcttactaaatgatacttaaataccagttccttggagcccacataaatccagcttcagtgagaaattacgcacagagagggtgcatagcttttactctaagaaaactaccttaaataccataagcaacggagagaaaatctcagctggtcatttataaatcaaatgacattcaattagcagatgcccctaatgcacaagagatcatatagtgttcacataagggaatttttgaaataattatttttctaagttggtatgtacaagaaacaaaaataactgctcagtaagtgatatggtccctttcctcccttcctcttttacccactcatttagttgaatgcttactgtgtgccagatactgtgttaagccctgcagacacagtaacaaacaacaatcattgtcgttgccttcagaaaacctacgtggtttaagaaaaagcaaccaattggttaaagttgatcatttttaaaatgatcgtttgtgaattgtgtataaaaagtttacaagtatttgtacaactgtagttgttcatattatacacagacatctagttatttcagagaaaattattttttaccagaattcttatgttgtaatttaaagttatttacttttggtttgttaaaatcagttaattggaattaatataattctaatcctttttagagaccaatcgttttttagttccatttaatatatcaatataaggcattaccacaaagatttttaaatgcttagaatagaattgaattaaactaattttaatgtagatttatgactgaaataaatacgtgctttgctgcatataatttttcaaaggcttacccattttataattttctgatggcatttagaaaggttcttgttgtatgcccaaagagcgtaattcctctttccattctgactagaattaatatgttctgtagcatatatgtattataaatatttatatgtacatataaatgtatatattatagcatagtaattaacaggctattcaatttaagattattttaaattcctcacatatcaaaatctgagttatttagacactttatgagttgcctaaatttgaatcaacactattagttttctaaagttgcgtaatttgtatttaattcattgttagttttctgaaactagtaatccaacttagtattgggatttctgaggtcctaatctgccagtagaaagaaggcagttgaaatattttaaaaaatcaatccttttttttatttgtgggcaaaagacatgtaagtgaattagttgattaaaatataaggtatttttctacaatacaaagctatttttatctattctgtgaagaaatactggcgagttgatgcttaaagccctggaaatatttatgttttagcctcagggaagatttatgttttggaaaaacttacagttggctcgttcgacatggaggtgatttatatctctttcgttagatgattaatttgagaataactccttctgcccttttgtttatagtttgcttctgtttcaaaaggcattttaaattgttttcatcaaaagtccaaattatgcattttaaacctcaatcagtaaaactttctttcctaaaagtgctatgcattgacaatttgtgacttttacaaaagagttattttatttcatgttgaaatactcagcaatctagaaaaataaattaaaatgtattttaaatgccattagaaaattataagatgggtaagccttttgaaaaattatatgcagcaaagcacgtatttatttcagccataaatctacattaaaatcagtttaattcaattctattctaagcatttaaaaatctttgtggtaatgccttatattgatatattaaatggaactaaaaaatgattggtctctaaaaaggattcgaattatattaattccaattaactgattttaacaaaccaaaaacccatgcagcttagctcaggaattatacagatcaagggaccaggctacctgagtttgaacctaaccatgtttcttgacctttctgtgtcatctataaaatgtgatactaatatttcctattgtatagtgttgtagtgatgattaagtgagttaatatatgtaaagattttagaacaatgcctggcttctagtaaatactatttaactcttagctattgatgttattgttagttaatatgctaaatgtgaatggcaaaaatatcaatagcaatgagcctaaagttctttatgaaataattgctgacaaatgtttatagagaacttttataaaatcacaggatttttatgggtagaattccttcatcttaagaaaactattaactataaactgaattctaagtattccttttataaccagtgtaaacttcatgagaataagaaccttgtctatcttatttacaactgtatccccagagactaaaagtatttgatgtagtataggtactcaataaatatttcttcttcataggtagaggaaacaaatattttttactgacaaacaaattattaaagtaaaatatcacccaatcctacagtgaaaatatctacagaaaactataacatcacttacttggatatcataatgaggaggagattccctctttccagctaccaaacctaattaatttaggacaggtggtcaccttctcccatattaaaaattttcagcaataacaatattaatgtcacttactacccctgattatttttgatcaatttgaaagtcacgctttttgtgagaaacaggaattatctctttaagactcctattatctgttcattattctgcagacatgaacaaaagctttatatagcttaatccattactaaagtcatattttgcaaaatagagaaacactggatgtaaggccaggaaaccagattctatccttaaatatgaactattttgatttatttagttattttagcttgggcatatcacttagtaatatgtaagggtcaaacaggatgttgttaaggtcattttcaactctaaaattctgttattttctcttttacctttcctaaggaattcaatttcctttagctgtataccatctaatatctatctccttaataatattgttcttttccttaaatcccctctattttatcacattattttaaaaggatagagaataaatgtaaggaatatttaagtcagacacatgcccaatatagagaaaggattagacttaccagtgtcaagaactgtaaaagatatgagattttacccaacttgaataataacaacttagcctgccacagtttcatcaatcctggcagaagacatgaaacttctgagtcagagaaaaaggcattattactcatggcagcaagcagcatgagccttatgtttgttttggttgcccttgcccccaggtaccagaaacaacccaggtaggtgccacatattcagtgggtttgcatcacagcaaagtagggaaggcaaatttttaaaaaatggattgcaggcaaacttgccctttgccaaaagggagactttatctttaacattctaaacagtaagcaaatctatccttgctttgcggcataaacatcctttaaaagatagcccagaacaaaagggtggttagtacctccctcgtaagacatgcagaagcacaaaagcctcatggaaagacccattgtctctcaacaataccatttttcatttctatactgtcttggtgtctggcaaattttttatgagtataccactccattaacagctctgattaatattatcaatagagactgtgaccaaaactattcaatttgtctcatatagcatttaattaaaggctactgttaatagaacgccaagcaagtagatgaggccagcctgcactattgatctcaaccctgtcccccaggattgcaaactcaaacagccgaatagatcccataaatcatccaagtctatcttagaaagccagatgatttgctccctacgtttctgaattggcctttctgcttgatttgaggcattaattcaggaacatcaacaaagacaaggacattttttagaaaactgcaacagactcagtgtgtctccgactttggcccaagtgggcaaccataaggatactgagctaacagtgtactaaaccaagtagtctttatctttttttatttaggaccatgtcaaggaataagaatatccagctggcagagccagaattaagtttgaatcctctagattcccttttggctaggtttctaccctacaggtgtaaagatagttcagaacctagagcagttagtgcctcactcacaagataaatagaaatgcaaaagactcagagcattgttgccaacaaccagctcttgggcattgcatttgtttatgaacaaatattagcaaatgttgctcttttgtttaccacaccatggctaactataccgctgactcattcagcttacaatcagctctagtcccggagtatctttttttctggtgtttttctattcttacttctcttcagtctatactgttgatttttcattccatttcttgtagaatgctgtcctatttcacagccacttcttagtttcctatataatctattctggaaagtttaataccttcatgtatcaaaaatgtcaagggtcactctgtgtcttcactctgataatattgacctgaatccccagtaatggattaagataaagcacattcaaatatatcttattttctaaagatttatttggaagtgcaagtagaatatattagaagtagatagagtttgggggtcagacatacttgctttaagagctcagctccaccatttatttaccatgttatctttagagaattcatcttctcatctataaagggaatgcttctatttcttagagttgttaaaattaaataagatcatatattaaagtaactggtggaattccagacacactagcaggtatgcaatacatatcaattctctatccccttcttaatttactattgtgaatgtgtggaggccatcaaagaatgtattgaaatgatattgaaatgttgcactagggcttccacattttgcttctgtgcaaacatggaagtctttttgtatgttatgcattattattttacttactattatttgcttgttatggttctgtaatatgcactctatatctgagaatataatgaatctcaaattatcttgatttactcaaggacttttttagaaacttgaaaataacattctgattgctccatttcattgaaatattaaaacaccaattgtaatttactttcatgccaactttctagtgactggtaaattgaaaattagggtttttttctgactttgatagattcacaatctgattatttggaagtcacatactacccatgttaccaacccaatagactggaaagtgacactggaacaacctgagcatgtatgtaacacatcataactaatcttattaatgccattagtactgaattggagttacactgacacaaccttaccttatttagtccataaaattaggtagttcgaccgattaaccctgtttctaaaaggttatgtttaaagaaatatttgtatatagacttattttttcattgacctgcaatataattcccatagaaatgaagttagccctcagatgtatttagatatcatatttctaacatttttaacgttcagtcttttttgtcaatataaaaattgccagcatatatttttccatttaacacccacaaattgtgaataaataaacaatgcaactacatttcactttatttagtgcatgtattaccaaaattagccatattgttaattcttaattcatagggagggagatctcacagattttatgaatgaagaattaactataaatatttaaggatccactctggcattttttcaaatgttctgcagaattaacaagacttgttcaatttgtaacatcattctgcctgattctgtcaccaataagtacaaattgagtctaatgacaaaatgataaaaagatattttggccaggtgcagtggctcacgccttaatcccagcactttggaaggccgaggcaggtggattgcctgagatcaggagttcgagaccagcctggttaacctggcaaaactccgtctctactaaaaacacaaaatttagctgtgtgtgatggtgggcatctgtaatcccagctactcgggaggctgaggcaggagaatcacttgaacccaggaggcggaggttgcagtgagctggaattgcgccactgtactccagactgggtgacaagagcgaaactcctctcaaaaacaaacaaacaaaaaagatatttcacatgatatgaatagccattttttgtcatccaaattattaacaaatcactgcaatttcagaaaagcttctgttaacagtaatgacaacttatcatctttgtactttagaataagttgccaggtatgaaaattagggcaattccttactatttcaagtgctaaatttgaatctgtatgtaataagtaaactttgagtattagcttatttgccttaacttgtttaatgttttaaataaaattgtagtacttttcaagtaaattcatttacaggattaaagaatcaaacagtactgttaaaggcttataataaaaaataccatttcaataaatgcattggggacaactacatagcatttgggaaaacacaaatttgggtttgtacatgactactgtgacaatgtaaatatcagatggatcaagattttaaaggtgaaaactaaaccacaaaagtcctaaagaaaacataagaattttaaaaataattaagcataacttttaaaatatattttaaactggaggtataaatagaaaaaagatagtatattttactgcatgagcaaacaactcctatataggggaaaaaataccccactaaactaaatcaattggccagctgggaaaaaatatttacaactcacatcataacaaacaactacatatccaaatatagagagaaattcctccaaatcaatttttttaaatcccaagaagaaagaataatatggcttttaaacatatgaaatagacctaaattcactcatcatttaaaaaatataaagtaaaacacctctgtgatactagttttcgcttataagattggaagtggtcaaaaagtttgatagtacactatgttagcaaatgttgagaaacatacctatacattttagggcaagtaggtatggatataatctttatggagggcaatttgatactgtctgtcaaagtttcactctaggctcattcatttataaaattacacatgtaccaggttgttcatttccatattgcttgtaatagtaaaaaaaaaaaaatagagacaacctagatgtctagctacagatgaatggttaataaagttataaaactttttatttaaacaaatataaaatgttcacattttttggcgtggcctggtggctcatgcttgtaatcccagcaccttggggggctgaggtgggtggaacacctgagatcaggagttcaggaccaacctggccaacatggggaaacctcatctctactaaaaatacaaaaatcagccaagtgtggtggtgggttcctataatcccagctatgcaggaggctgaggcaggagaatcacttgaacttgggaggcagaagttgcactgagccaagatcgtgccactgcactccagcctgggagacagagcaaaactctgtattaaaaaaaaaaaaaaaataaataaaaattcacattttaatgactgtaaatattgtcatgtgcagagctaagtggtgtaccttttctttcttgaatagtttgtcgtttgtttcggtttgttttttttctggcatttctaattctttctactttccctgttattgccttccatatttttcaaattttctcattgagtttcttgttttctgagagtatcattcagacctgctattccatctgttgtagggagctttctaagccatctgcagaattcccattctgtgactacctttatttttttctctgagttgattccactgccgcttgttttccttgtcatctccattcttggttttactccttcgtttatgtgaacatacctttatacaaattatggaaaaaatttgaaaggaaggtacgtcttctgggattttacacatctaaaaatgttttgttttgttttttcactttcacacttgattgatagtttatctgagcatagaattcttgcttgaaaattatttccctaagaattataaagatttttcttgagtgtcttctaacacatgttgctgctgagaagtctaatgcctatggattctttttcctcttgtgctcccaagaagagagaaaacaagaatactttcttctccagaaagtcttcattcaagaaagcagaagggagggacattttctacatttcctttctggttgagtagaactacacttacctctcctccttcacctgtgccgtgtgattcatgattgagccttatgatctatgagagcatctctatgtagtgatgaagcacttgatgtttagacattcttctcataatagagcctactttttcagaccattgtcttgtgtgaactcaacaatccttatactattgcaatcttaatcctcctaagaaaatggatgcttctggcagaaaggaggaaggccagtagaaagaagttaaaaagagacgatacttcaatctatatttttaaaacttaaaaaaaaattattacagcatggagcatttttctcctcttaaacgtttgattttcaacacctcactcaattgcaaattgagtgatattgtataaaccatcttcacagttatcagcattaaatacctaggtctttcatgtagtatgtgagtatttctgtactgatttattttttaagccaaaaattactagattaagtttcccatggtctagtcatttatgttgcataacccaaatgcaaaagttacccatgatattaaatttgaaattacatgtatatcatgctgcccattgttccaaaaacattggaagacattttaaaaccacatatgtatagattgttccttctgtctgcagtagaaccatgttcatgttttcacgtggccactgacctttggcaaagccaattcaaaaattcagactattatcatcatcagacaaatcattaaaatggagtcaatcatacacccacttgcataaatcattaagacagatgatacaaatggatttgacagaccatgacctaccaattttttacttgtcaacaaagcttagagttaactgaaataaaaccatttcatttagtaggttactgccaaaatataacaaatctatacaaagtttttcatagtcaagaataatttaaaagacaaaattaccaaaatatgaatgtgcttatgataaataagtgctagtaaacccagaataattaccaaagctaaaactacaccattaaaaatgatataagcattttaaataacttgattgtttctatttttagtagttaatggtttgtatagatactttaatctcttctgttcatgttgttttttcagaaaataagtacttaatcctaatcaatgtgagataaattaaggaacgcaggttatatttcttcttttaatgaagggcaaactcctccagatgtaagcatagcatctatttgcagtactgccacataagaagtaaaaatagcttggattattttggtatcaagtaggatttgtagatgaagaatattatctaaattggattttccatagctatggcagttaatattctaactgctgcagaagtaccaagagaaatgcaaagaatcagaatcttagcagtcattcatccattcgacacctactaactgcaaggcacactgctggataatatgcagtatggaaagtgaggacatacacaacttaaaaaatggaaagtctcataataggagcaaaaattattgttagaagagtgcttatgagaagtacagatatcacaacatcattccagattcacagactctatgttctattattcaattaaaaatgtttttagctttattggcttaaacaatagcgacagagaacaagttatttcaggacctatataataaaaagataagttttctgagttcaaaaaacatgggaaaagattatgattaaaatatattcctgcaaccacatggaacgatcatatttcattgtgtcccatgtctgaaatgattccaggtctccatatgaaattgttaagttttaaaagcactatgtgtaacctctaatttttaaatttttgaaggcaggataaaattgttcacccagttagggaactggtttactacaattggtaatgattgaatcattcttgtccaccctaatatttcacgagattttctttctagcacagctcttcctattctctcttatcagtgcttccggggagatttgtcaaggcctttattagtgtgtggaagagacgctagtgttccttgtttcacagatatctatttcctagtacacactgactactgattttgataaaatgataggcttttatacaaacatagaattccttttctaaacacttgtgcacccttaggaaaatttttttcttatgataattggataaaataacataacataaagctggtcaccctctaatttattaacataaacattcttaaattctacttctcagaactaatgtaaaagtcacttcctttctggctgctctagaggttaaaaaaaattatggcactaatagagaagtgaggaaagttaaaattaaaaaaaagaaaaattacttcttgagagtggactatatattatatttttacttatttgcttttttcttttataaaactcatttcctatcctagaacaattcattttcaagagaagaaagtgcacgtataaaacaaaatttcattccgatgtccccaacttaaaactttattcctgttattcccatgttaaaggcacaaaattttctgtaaaaacagataaattctgttttccattttattttcatacattctatttgaaacacagaaaatcccctagtagtagtttagaatttatgcagattctagttaatcttatgtttcaagtctatgaagcatattctaaagcaataatcataacacttaaaatacacttgcataacatttttgttgaagtgggtattaggtatcatatgcactgcaacattcctggcaagggagtgcatgtaatactttaaaatgaaacttccctttttcacttcagctccttttcttgattaagaagctgtaaatgtatcttgcctcttttcacaaatgaaaatgtgttcaaacgtaattaatctaccctattaactctacaaaacatctgctatatttgttaaacacttcaaacttctgttctgaaccagttaattctaagtaatttctcagttaaatatttacatgggcttccatgatgataagctctagcttgtcttaaataatcagcagattgtccagagagagctgtgtgaaatgtaacacattgtaatagctatccactggaacttaaaatggttagctggcttggactattttttgcttatttttatcttagccaaaagaggtaacagccttatgaattccattctttgtcaatatttttaatgtccagaattgtgttaaacggaaaatgaatacctatgtagacctatgcagatgtttaccttgtgaaaatgctaaatccaatctcaaatgtctctttcagaaaagtgataaatctgtatgtgtgcaaaattttagaaataactcaatttacagttatttttatagcagactaagtaaattaaaaagtagaaaacattgataggcatttttcatcagcaaattaaattgaagaagaaaaaaaatccacaggctatgcaaatgtgtggtgtgtacaaagataattaagactatgattctctaactgcacaaattatataaatctgtaaaatatcaggttttggtcaaaaattggaataagttccacaacagagatgctgttacaatggtaaatgattaatttgtaaatgaactataaggcaatttttctcatagacatcagagaatagaatgatcacttcagactgaggaagacagacaagattgaaagttctccaatgtggtaattaagtccaagttttgaaaataaaaatgattatataaagagcagatgccagttctccaacaccaacactcagtattgttctaactaggtgttttcttctttacaatatgccaaatgtttattgagttccttctataagtattgtagaggttagaaaaaaatgagcctgtatcctctacagcaggggtccccaacccccgggaaaaggaccagtaccagttcgcagcctgttaggaaccggaccacatagcaggaggtgagtggtgggcaagtgagcaagcttcatctgtatctacagccactccccattgctcacgttactgcctgagctccacctcctgtcagatcagtggctgcattagattctcataagagcatgaaccctattgtgaactgtgcacatgagggatctaggttgcgtgctgcttatgagaatctactgcctgatgatctgtcactgtctcccatcacccctagaagggaccgtctagttgcaggaaaacaagctcaggactctcactgattccacattacggtgagtgtataattatttcattatatattacagtgtaataataatagaaataaagtgcacaaaaaaatataatgtgcttgaatcatcctgaaaccatgcccccatcagggttcatggaaaaattgtcttccacaaaacttgtccttggtgctgaaaaggttggggaccgatgctctagagctcacagtcaactaaaaggataaatgaagcacacacataatgacctttacaaaaccagaataaggaagaactgtgggagggattctgagacaaatgctgagctctatccaagttcaatttacataaactggaggttaagtatgtctgtaattttcataataagtgatcgataaatccactgtttgactttactaaatgggaggaacagtgtcctggatcattataaataatcctcccagaattttaatttgttagtttgggaatagatattatttttctacagttgattgatctgtgttttactaatgataatattaaaattatttttgctttgtcaatttcaactaatgttcaatactcttctcaaaatgttctgaagattaggagagcatggctagaattacaaattggtcttggatcattcaaagagtgaatgattcatcaaggattaaaaaagaatttcctcaacttctaatcaaacccatagctgggtcctagacttagcaaaactgtggaggaggagatcagagtcatggtaacatctaggaggcccgtaagtgatttatgtatgtgagtttgtaccatatcttagtacttgagtctcgcatacaaaagattatcataaatattttttgcgtttgttaaatacattccaaatcaaatattatatccttgcattaggtagactttgctacataatttctttaaatagtaaagggagtagatttttgattatatgtgtctcagaattaagtgaactccctgatgtgtatgttttagtaactcatgtttaaaaacactgaatgagctgtcagcatttggatgaatatcaaaaatgttatatattagtttgactattcatgaaattataatagttttcctaaggataagagagaagagtttaatctagagccaagatcgtgtcaggcttataaaaaaatgacacaacctccctgcaattatattgtaattaatacttgttatatttgaatttcaaaatttgtttttcttataaacactaggaatttgccattttaaagttggcctaattatccaacattacttgattatatatcatttggcaggttttgttgtttttttgtttttaactacaaacagaactgattagtttttttcccttttttttcctacctaaatcaataaaacatagactccatatgcccctgtaacattaaattgctcccaaagtagataaaagaaatgagagtgataaatacataaatttcattcaactgttgtggagaaggagtaacaaagatttgggggaacagtgagaactgatgacatatgcagaattttttgtactaacactttaaaaaaattagttacaataatttatactgaactctgagaatattaatcaaatgaaagccatctgatttaaaaattaaaatacgtatattacttttttattcaaaataaaattagatggtgaaattaagcatgtatgacattcatgaaaatttagtaataaaataatttacagacaggcaaatgctgagagattttgtcaccaccaggcctgccctacaagagctcctgaaggaagcactaaacatggaaaggaacaactggtaacggccactgcaaaaacatgccaaattgtaaagaccatcaagtctaggaagaaactgcatcaactaacgagcaaaataaccagctaacatcataatgacaggatcaaattcacacgtaacaatattaaccttaaatgtaaatggcctaaatgctccaattaaaagacacagactggcaaattggataaagagtcaagacccatcagtgtgctgtattcaggaaacctatctcatctgcagagacacacataggctcaaaataaagggatggaggaagatctaccaagcaaatggaaaacaaaaaaaggcaggggttgcaatcctagtctctgataaaacagactttaaaccaacaaagatcaaaagagacaaagaaggccattacataatggtaaagggatcaattcaacaagaagagctaactatcctaaatatatatgcacccaatacaggagcacccagattcataaagcaagtccttagagacctacaaagagccttagactcccatacagtaataatgggagactttaacaccccactgtcaacattagacagatgaatgagacagaaagttaacaaggatatccagaaattgaattcagctctgcaccaagcagacctaatacacatctacagaactctccaccccaaatcaacagaatatacatttttttcagcaccacactgcacctattccaaaattgaccacatagttggaagtaaagcactcctcagcaaatgtaaaagaacagaaatcacaacaaactgtctctcagaccacagtgcaatcaaactagaactcaggattaagaaactcactcaaaaccgctcaactacatggaaactgaacaacctgctcctgaatgactgctgggtacataatgaaatgaagacagaaataaagatgttctttgaaaccaacgagaacaaagacacaacataccagaatctctgggacacatttaaagcagtgtgtagagggaaatttatagcactaaatgcccacaagagaaagcaggaaagatctaaaattgacaccccaacatcgcaattaaaagaactagagaagcaagagcaaacacattcaaaagctagcagaaggcaagaaataactaagatcagagcagaactgaaggagatagagacacaaaaaacccttcaaaaaattaatgaatccaggagctggttttttgaaaagatcaacagaattgatagaccgctagcaagactaataaagaagagagaagaatcaaatagatgcaataaaaaatgataaaggggatatcaccactgatcccacagaaatacaaactaccataagagaatactataaacacctctatggaaataaactagaaaatctagaagaaatggataaactcctcgacacatacaccctcccaagactaaaccaggaagaagttgaatctcttaatagaccaataataggctctgaaattgaggcaataattaatagcttaccaaccaaaaagagtccaggaccagatggattcacagccgaattctaccagaggtacaaggaggagctggtaccattccttctgaaactactccaatcaatagaaaaagagagaatcctccctaactcattttatgaggacagcatcatcctgataccaaagcctggcagagacacaacaaaaaaagagaattttagaccaatatcccagatgaacatcaatgccaaaatcctcaataaagtactggaaaaccgaatccagcagcacatcaaaaagcttatccaccatgatcaagtgggcttcatccctgggatgcaaggctggtttaacacacacaaatcatataaacagaaccaaagacaaaaaccacatgattatctcaacagatgcagaaaaggcctttgacaaaattcaacagcccttcatgctaaaaactctcaataaattaggtattgatgggacgtatctcaaaataataagagctatttatgacaaacccacagccaatatcatactggatgggcaaaaactggaagcattccctttgaaaactggcacaagacagggatgccctccttcaccactcctattcaacatagtgttggaagttctggccagggcaatcaggcaggagaaggaaataaagggtattcaattaggaaaagaggaagtcaaattgtccctgtttgcagatgacatgattgtatatctagaaaaccccatcgtctcagcccaaaatctccttaagttgataagcaacttcagcaaagtctcaggatacaaaatgtgcaaaaatcacaagcattcttatacaccaataacaaacaaacagagagccaaatcatgagtgaactcccattcacaattgcttcaaacagaataaaatacctaggaatccaacttacaagggatgtgaaggacctcttcaaggagaactacaaaccactgctcaacgaaataaaagaggacacaaacaaatgggagaacattcaatgctcatggagaggaagaatcaatatcatgaaaatggccatactgcccaaggtaatttatagattcaatgcaatctccatcaagctaccaatgagtttcttcacagaattggaaaaaactactttaaagttcgtatggaaccaaaaaagagccagcattgccaagtcaatcctaagccaaaagaacaaagctggaggcatcatgctacctaacttcagactctactacaaggctacagtaaccaaaacagcatgatactggtaccaaaacagagatatagaccaacggaacagaacagagccctcagaaataataccacacatctacaactatctgatctttgacaaacctgacaaaaacaagaaatggggaaaggattccctatttaacaaatggtgctgggaaaacgggctagccgtatgtagaaagctgaaactgggtcccttccttacaccttacataaaaattaattcaagatggattaaagacttaaatgttagacctaaaaccataaaaaccctagaagaaaacctaggcaataccattcaggatataggcatgggcaaggacttcatgtctaaaacaccaaaagcaatggcaacaaaagccaaaattgacaaatgggatctaattaaactaaagagcttctgcacagcaaaagaaactgccatcagagtgaacaggcaacctacagaatgggagaaaatttttgcagtctacttatctgacaaagggctaatatccagaatctacaaagaactcaaacaaatttacaagaaaaaaacaaacaaccccatcaaaaagtgggcaaagggtatgtacagacacttctcaaaagaagatatttatgcagccaacagacacatgaaaaaatgctcatcatcactggccatcagagaaatgcaaatcaaaaccacaatgagatattatctcacaccagttagaatggcaatcattaaaaagtcaggtgctggagaggatgtggagaaataggaacacttttacactgttggtgggactgtaaactagttcaaccattgtggaagacaatgcagcgattcctcagggatctagaactagaaataccatttgacccagccataccattactgggtatatacccaaaggaatataattcatgctgctataaagacacatgcacacgtatgtttattgcagcactgctcacaatagcaaagacttggaaccaacccaaatgtccaacagtgatagactggattaagaaaatgtggcacatatacaccatggaatactatgcagccataaaaaaggatgagttcatgtcctttgtagggatatggatgaagctggaaaccatcattctcagcaaactatcacaaggacaaaaaaacaaacaccacatgttctcactcataggtgggaattgagcaatgagaacacatggacacaggaaggggaacatcacacctgggtcctgttgtggggtggggggagtggggagggatagcattgggagatatacctaatgtaaataatgagttaatgggtgcagcacaccaacatggcacatgtatacatatgtaacaaacctgcacgttgtgcacatgtaccctagaacttaaagtataataaaactatatatatataaaagaaaatttagtttatatgaaaaaaattaaaaatgaatatatacataataagtaactatggatcatgataagtacatctggccttttagtttcaacgtagccatcactttttagaaaaaggtcatattataaaaatgaatgttaattatttttaaattagataacaaaagaatttcttctggaataaggggaataaatttacatttatttgcatttgtattatcagatttttcatttatttcaaaccatttaaggcatttaatagatgatgggtgaattataaatatttggaaaactttttgaaaattactgcctttatccaaaaacttttattggagtggatgagttccccatgtgaattgtcatttggccagtaacaggcacataccgtgatgaataaaatatagattctgttatagattagagcctggtgagagtaacaaatcattacatgaataatcacttaaatgaattagtggtaagtacttgagagaaaaagtgcaaggcactaggagactgaaacaaggcattgtctccaagtggtacatcagggaagatcaagcctggttttcttaagatcagtttggctgtgatgtgaatggatggaggaatgtgtagcttcaactaggaagctcttacagatgagcaagaatatgggagcagcaggagtggagagaaatggatgaatccaaacgtatcttgtagataaagccaacaagattttgtaactgtatgtgagagagaagtttaagagagttgaatgtggagaatgagttctagatttctggcatgagcatgaagagagtgtggtatggatttattgatttggggcatggtggaagaggatccagttctggagggaggatcctgagttcagcatttgatggggtaaactgtggatgcctgtgaggtagcagtggttccatcaagcacgtcgtgggtctgaatgcagctcagagataaactggagttgtagatctgggaattgctggtctagagaatccaaagcccacagatgtgtgagatcaatgtgagagaatgtggactgagaagaaaatgagacaaaaatctcccgcatttaatggttgattagggaagaaagaagcagcaggaaagaagtagtcataactgctgaagttttttttgaatggcaatatcatcatttttaatttcatgtggagtaagaatttctgtctaaaataagaatcaggagacttgactttcagattaatacctgggatttcctaggactttgttatgatctgaaaaaaaaagaatgtttattttccctaccactttatattattacaagaaagcagtaaataatatttttaatattaaaagttcaatgttatgagtaggcatgtttgaagccaacaccataatcatgcatttccttagaatatactttaaaagctactctcaaccaaaaatataattttatttatagagtttaaatgtataaagaggtatctttttctgcttgcaaatattgttaccacttatttatggtggtttgttgaaacatggttccaatcatatgagattcttcactggcggtgaacatttggtctcacacctggtgtgggtctgcctttttttctttctggagttagctacaaagaagccagtcaaagaagggcaattcatcattattaatatattatatagttcaaccttgaaagagctcaaattactttaaaagtttgttttaatcaacaaaataattattaattttcacaacattctttgtgaggcaggtgtacttgaaacagtgtattaacatgtgtctctttttcctcatagggttccctggggatacaaggcccccaaggtccacctggaaaagagggtcagagggtaagtaaagctggaacaactggtgggcattactaacttaggggatacttatttgggaacactaatgaaaatgaaaccgaaatagagcaagcagatgggcatatggagagtatcaattatccaaaggctgaaatttgagattcgagattttgacagaggttttgcaattcagaaaattctatatttttcaagattggcagcacaagtgtagagatattgtttggataaaatgaattagccctaatttgatctacactactttggtcatacttttagtttttgaattaagttgatgagtatctttgtggaggtctagcctatttattaattccataaaggttgtggatattaactacattctttatccaaattaaattattgacttcactggcttttcataactctcctttcattgccatttattgcctttaactgagacaaaatagtaagcaaataaatcatcgttggaattggtagtagagcaataacctcctatttctagtgcagttcaatttcatcattccacagtaaaacgaagccctgcagtgttatgacaactggtcagcttcatatgagcagtggggaccccattcttgtgttttactgttattattatcattttcaaaccattttaaagtctcaaaaaatcttgtgtgttctttctcatgtgcttatttatggcagtctttgtactaaatagtacaggtactgtcaacttctgttcccttgttgatgagcattccatgacttagagtttagatgatgtgcctaaacttgagcttctgactgtagtcctacgttctcttttattattaaccccaaatatgtttcttagacattctcatttattattcccagttctgccttctgtaaaataagtctctttcctcaactacaaatatttgagggtcagtggtgtattgtactaaggtttaccttttatcaagttaataaaattccaattctcttaacttgttctcttatcgtatggattctggactctccaacatgccaataatctttgtcagaaaacactcattggctttccagagttgtcgagaatgagactggatacatgtggtcttacttagggcagagtaaaatgaggcaagtacgccccataccacagacaacatgctactattatggcctaagattgagccaatgctcctttgtctggtattgtacttttgacttgtactacatgtggtcaattaaatgctcctccctttttattttaatgaaaactgctaagtcaggtcttcacccagcccgttgttgtacagttacctttttgaatcacagagtaggaactgatccttgttgttaaatttcatctttattgattttaatccctaatagcattctattctttgggggctttttgcttttaaaaaatgatttgaatcctgttttccagtgaaatatccctcagccttatgctactttaaaatttgataagcctaccttctgtcttcatttaaatcgttaataaatcctgaacagaacagggcctgacaaccctgtgtaacaccagcctaggctaccatcttttccaccattgatgtccttaaagtgtgacaatcaaatcatgtacaaatgtatttgaaccctaccaccttcccacccacatttcttgatttggcttgtaagataattatgacagacttgttagatactgggtgaactgaaaaaatatttaaatgaggctttttagaaataataatgcttcaaattaaaattgtaccctatcaaagcttgcatttcataagaaagtagattaaagaataaattaaacatgtattttccatgataataaagaaggaaatcagttaaattgtaaagttcaaccactattttatgtaaatttactccatttataaatgcgtatagtccagataattttatattacttttatcttctatcaagagtaacataatgtcagaaactaaaaaatgtaatagaacttatagacacttttaggcatagttcgtcattattgctactgctctttcccaaatgccctatttatcaaaagaagtagctagagcaggtattattgacattatccacatttacaaataattatatgcatttggattatatccatatatgctcagtgatttattctactttataagctacttgaatgggaaacaaatgaattttaaaaatgagcgttcttacatatttacatttaggtccaactgagtgccaccatttcttctcagctcaatagttaaggagtactcagctctttcagacatataaatgtatttgtacatgtatgcctgtgtatatacatatgtgtgtatacatacagatgcacattctgaaagctaagaccaataatttttctatttcactaaagtttgcagtagaaaacaatagtgagaaaaatctaggaatttaaaatcatttttatttacccaatgttaaaaacctcttgtattttaattgagtggttgaccaagaaggtattgactatcattaaggctatttaaatgaaacataaaatatgtgaagttttatgtactttattcctagacataatgactttaattaaagcagaacatttaattttaaacaaatcattaacttgttggttttcatcaatgattaaatacgtagtagctactactctaccaatatctcacaattatggtgagtttcaaacatgggtgtcacatttaaacatgctttgaaaaatatcaaacattatagaaacatgttaatattgctattattattatgaaagacataggattctgatcaatgaattctttttctttttctctttaactctttgtgtagtttcctataagcataatagcaacactatttttgcaagtaccacgccaaggttctgtttgaaattttgattagttgattttatttttttaattatcatttaagctgctaaatcttagtttataaagtgttcatttaataaaatgtagaagtaatgtgcttcttacacttaaaagctattcttaacaatgttctgtgacaatatgtatctgaaatttatgggctgttttatttctcaacttcctgattttcattttttggatcttttatatgccattatttatttatttactttgtcttcttgaagccctgcaagcaaaatatttggttgacatattttttagtcttacatcctttatggattcacacagtttttagaattcaatgaatgttgaatattgatcctaagctacagatgagaatgtttcagatcacgatgagggagaacagaatggcattgggggttgggggccttcctggaagttaagagggggtttaatccatcatgaggcagaaaaaggccgtacagaaccaagaagtcaacagaagagcggttctagattcttgaagggttcagcagaattaaaatttggaacaaagtaagtggagggatgctggataagagaagtggctggaattggtgccaggggagagaagttcggttgagtagtgaggagggcactggaaacaaaaatctcaagaaaatgtgtaaggaaattagggcatgagttgtgaggtaggagaggcaaacaatggagattgtggtggagggaaaaggacaggaactggatggaaacccagagaagtatctttgtgaaaagtggaatatttcaggtagcagatcatgttcatggatattaatgagaaacattgcaaaagaactggcattataaaaattccatttaagatgtaggttccttgcaggatttcttagtattcctaacaaacagactctccccaaaaataatgaaaacaataatttttatgtaaccttgaattttcattttatagtcacattaaatgcacatctgaataatctcaaggttagcgtgaagctaccctggtctttttaaaagaagttcctctaggtctctgaaaaaagacatttactggtgaatcaactagttactgccgcaaacagaagtttgtgtggttggaccaagatgacacctcactcttgcactctgttgctggatcctaattttgatcctgaacagaaactttatgttttaaattccctgtaacttacccctctatcctgccctgtcttgctctcaatttatcctctctgcctgtgcctgtcctttttcccctctctgggcaaccatcctcttgattgcctccttgcaacatttttgtgcaggttttactttcccttgaagtgcttgctccaagctggctttgaagctgtgtctggagtcaggattccttgcattctaaacagcacagagaacatcaacctacctacccctgcccccgtcaagatgtgtttctttgcaccagcccacacttgatggcaaaggggctgggtcacatttcctccatgagctgggagcctacaaaagtacaggagggcagggcaagcaacatgtccactttcatcttatggtgcaagcaacttggaatttagcatacaggttgcaccacagactttggggccagattgcctgaattttatttatttatttatttatttatttatttatttatttattattgagagagagttttgctcttgttgcccaggctgcagtgcagtggtgcagtcttggctcactacaacctccacctccccagttcaagtgattctcctgcctcaccctcccaagtagctgggattacaggcatgcaccaccatgcttggtgaatttttgtatttttagtagagatggggtttcaccatgttggtcaggctggtctcaaactcctgacctcaggtgatccaccctccttggcctaccaaagttctgggattacaggcctgagccacagcgcctggcccagattgcctgaatttaaatcccagctttactgcttatgagctttgtgatcttgtgtgaattcctcagccactctgcacctcacatgcctcttttagaaaatggagatgctaataacgcctaccccacagggctgtgatgaggagtaatgccatgtcggtgttagcctagtgatctcaagatgtttatagaagggaatgtaggtatacagcttcagaatattagtacttgattaaggagaatgtctaattgatcaagaaaaaatatttaagataaaatgacttttttcactactactctgttgaatctattttatttaaattttacctgaatcttactttacctagatgtccatgcccattttctaatgccccagaagcttgaggcccagtgttgatctaacttgataataaaattaagtatgtaaaaatgtctgcaaggtagagtagactattgccttttccttaaagaaagatatgaagattggtgtcatcactgtggagtagctgagacctcaaaatttgtttgatgaacaaattgtgctgatcatgtgtaaatttactgggattttcatgtaaaatttacacttggtttttcttttggtttgattctgaactggttgatatactttacctaagacagcacaagtaatgaattatgttattaataagtactggggtatattgatctcattaggtaaaaggacatcaaagtcattgcttctatgaaatcaacacatacaacaggactcacttaagcaaaattttccttaagcttatttgtttttacagggcttgggatatttttcaagtgaaattgtgccctcatagtctagccatgctctatgaaaactttgtagaacacagcaagacagtaatgcaggtcagacctgcctcacagtaaagtaaaaaaataataataatagtgtttcattgggcgcggtggctcatgtctgtaatcccagcactttggaaggccaagacgggcggatcacttgagatcagaagttcaagaccagcctggccaacatggtgaaaccctgtctctactaaaaatacaaaaattagctgggcatggtggtgggtgccagtaatctcagctactcgggagactgaggcaggagaatcgcttgaacccaggaggtggaagttgcagtgagccgagattgtgccactatactccagcctgggtgacagagcaagactccacctcaaaaaaaaaaaaaaaaaaagagagagaaagagtatttcttcttactttaagatagcttattccaagttaccaacttcacagctacaaagtgatctcattgttccaatgaaatgatttcagggtctggtagaaaccactaacaattgtctgcagttgcacatccttacacaggcttgaattttagagaggagtcttatagagaaaagaatggataattatgaatttataggaagtaattttgttagtttcacattataacaggtgatatgattgtcttcttatctttatgtgtcaaaactgacaatgacctttaaaatgcacgatgagtgtttcataattctgctctcactaaaacgatgactggtgtccttccaccaggaatttgtattactagcaagaaaaagtcaaaaattactttaaataatagttttaactctggtcgtaggtagaaaaaaagcatcttttttgcttggattcatctataaatataaacgtataccttaaaaataacacgttaaatgttctgtattctacaactattggttcatgcttattacttgttagaaaattcttggcatacagataacatcgtattttatttacttgctatgacatttcttcagaatgtctccatgaggattatcttgggagtttgcaagagataccatccttaattctgtctgacatttctagatgaataacagggaaattgggtaccctattcaggtccaagcaacaagtgcagagctttctccaacacattgtttgaatttacaaaaccaaatatgaaactcggtggataaaaataagcaaatctgcatttatccctgcatctctgtttgcagagctccatggtggactttggccgcttggtgtctcctaaaattggatcaaatatagttactgaagcaatgtagtaagacaggaaaaagggggaaaggctaatatatgttcatgtcaaacaaatgccttcaagggcgtagttgtgcagcgaggatagtcctttacttttgcctcatattctcttactggtgggaaagataaatcaaggaaaaagatgttggaaaacaacttctagcacaggctaattaaaatcagatgaacaagagatgtagcccagactttgtgatcacaggccatcccttagataaggttaaacagcacagctagttactgacagtgtgcctgtgtctccttgtggtaaatttcactctaactagtggtctctgcagtgcacttgagatagaagagacaaaacgccctggaaaggctgtcaatgagaaaaaaaaaaattgtaagcaatgattttgttccaataatacttatatcaatagtaaagcaacagtgagctgaggtccttacattcacttaaatgaagagctgaatgacattatttgtattgtaacaaaataacataataagttttctcttttatatggattagtaaaggaaaaatgttttgtattttcaaataggaccctgagtctgaatggtttatttatttatgtgaatagacccaagagctgttctctgatgtggaagaggcacatcatctaatggggactccttcaaactggagagattcagcctctgagccgagtggctgagagcttcagaaagaagcctggagaggtgagggtggacccatttcaggaacatcaaatcatcacattttctagctaaaggggtactatagtatcattccagcccaccaaataagaaaacagagacccagaaaacattggcaattctccaaggctgcagggctatttattctaactgttctgcataatatacacccattgtctattttgtggtatcacactgaaacccagatttgcatgttttaaaatagggatattgagaatttaaccaaatcactaacttttaaaaaagttacttaaaaatcactaacttaatttttctaattaaagccacacactagaagggacaaatataggtaggtacagctgatccctttatggtctccacacattgtgatgagcacacattctgtccctataacctgcaccaacatttgggaaccagcaatgcctggccagtgagggaccagggggagagtcagaactgctctttttttctcaggagagcaattggatcaatttgtgacttcagccaaatcactcaagactctagtctaaatttatctgttttatcataacttagccctcaggtatattatgggattaagccggaagcactttaaatgcactctggtgacaggtgttctatgaaggagtcttataaatattacctacttagccacagaaacacttaaagagaatggaaaaggagaaggcacattctgccaaagtggcgatatgctaatacacctgcatcaggatctttattcagaacattacactgaacacgttagtaactatttcatatgtttaccattggaaatgtcaagtagaaagttatttatccatttgggatggagcgaatatatgtgtggatggctgccaaaaccaagaattaatcacaagttattaatcaatttggaaaatataaacagataaattttcagaaatgcaaaacattcggagcatgaaacatttttatggcctaatgactttgaaagccagcaaattatgtttccaataaataagccctcaactttgtaaaactctatagtattttgagttaccttaggtaatggcacataattctcaaagcaactttaattttatagcacttttgtttttcttatacattatattttaattatcaagagagaagctattgcaaagtaaatgtgatgccataattctttaaaaagttgaaaatttatcttttatatgatgtacgtagattgtactgtgtttttatttctaaatttcttggaatggtagtattgagagtcgctcttgaattcttcagaaataccttagaaactactttttctcattttcctcaaaaccagtaaacttttacttggactttttttgtgtgaattattgtagattaatttgatatttatttgatatctctaatatgtccaacacaaacatatacatatatgtatgtacatgtatgtaagcattatccattgtgttttctaaattcacaacagtatacaacgtatgttgtgaccactgtattatggtgtcatttttggctctcaaatcactagacaatgcacttcttgaacactagaaaggactgttgtttgtatttcttatgtgagagatgttaacaatgtgtctatgcaaccgtgagaaagatgactgcagagtatctacaagtatatttaataccttgaatgtgcataaaattcaataatgtaaacacaatttatgtgcattcaatatttttattcattaataatgccactttaagaaaatcagtcttagaacatacaatgaaaagagcaagatatcattggaaaaaatctacaccttttgttctgccatattgaaggccgttgcttcacactctccattggccatgtgttttatgcagtcttccaaatcttttgcagaaacatttccatagctttgtgcatttattcaatcatgtttatagtttatttgtcttcgaaagtatttgagggtcttataaatgcaatcaaataaaaatctctacactgagagaaaaagacaagagctaatgaatagagagtaggaaagagaagaaaataagcaaaaacacctatactgagtgaggcaactgcatttgaacaaaaagcctctctgaaagatctgagggcctatttatttactcaagaaacatttgagtgcctgttttgtgtgacataccatggaagttggcttaagtcaggcttccctaaaagcagagcctaagatgggattcttgtataagcgatttacagaagaaacctgtaacagagtgagggaagcagacaagagaagagaagaatgcaggcaaaatgtggtttcaggagcatcaagtctctccctgatctcacaagacactctggagcacgacagaatttctcctgccttgaagcaaggggcgaggcttgccctcacagggtggggagatgggcagtaacttcccagtatctccaggccaggtagatcctgtagactaaggtaaccctccaggaatgggtgtagatagaagcttgtagcagccaacacccatggcaactgagcccaccctagcctggcaccaactgcacctgtacagaggtgaaataaaacacaatccttaacatcactgacacagaatccttgatggcttttgagtgaaagtgaagacatgattttaaaaagaactttgataatattaacctcacaggccgggttcagtggctcacacctgtaatcccagcactttgggaggccgaggcgggcaggtaacttgaggtcaggagttcgataccagcctggccaacatggtgaaactctgtctctactaaaaatacaaaaattagctgggcatggtggtgtgcacctctaatctcagctatgtgggaggctgaggcaggagaatctcttaatcccaggagacagaggcttcagtgagccgagctcacatcactgcactccagtgtgggcgacaaaggagactctatctcaaagaaaagaaaactattcttgtagtctaatcaataagtaataaagggcatgattataaaaaccagtgaaatggctgatgggagtgacatcaaggagattgaatgaacacagaacaggcaaaggacttaagtttcagaagtgattgctgacgtatcaagtctgaaatgatagtgcctttaaatgaagtagaaaacacttgaagaaaacattcttttagaagagatgagtcagtttgaagcctacagcattagggctacggaaagaatctgcaatcaaaagccccttaagatgtgagctgagtagaagaaccaagtttactgttagcaagtcatcagtttaagggtgataactaaagccatcacaatggggtgagggggcagtgtgcaagggagaaactagaaagaaaagaactgaaagtagaaccttgaaatttgggtaaacctatatataggaatggggtggagagatgaactagaaagtttaaagtatagaaaagtgggagaataagaagaaagttttgaaagggaggagactgcgaactgataggaaattcttcagaggtatcggaggatggaggttgagaaaaagccattggtgatcttgaaggaagctggtttcttagcatgtctgtgttgcacagaggcagacatgacactgcacggatctcaagagtgtagtagatattgagaaagtcaggggattatgaactattattctcaaaagctgaggtgtaaagagagatggcataagactacattgggagaggtcaaggaaaatctttgtttctttttttctcataagtgtatatatatatatgtgaatactcaactacgattacaaactgaagcaaagaagtctgtaaatagggagaaactgaagatgcaagcacaacaaacaataataaattatccagacataccggaagaggccaaaagggaaggcacaggtataaacatgggtcagcatctttaccttgaggacacaggaaaaggaaaggaggggcatggacactcactttgaggacaaagtagaaataaaggcttattgcatattcacattgcatatgcatattcttctcatatagaaagaattttttagtgtagatatgatttagtaaaacatttgctgtttataagaggcattaatcacaagattgttttcaggccaatagatacacctactactttcttccctcatgaacagcgagcccaacttaggtaaaagtagagagaaatatagaagtagaggaagtcaaactaaacgatggtgaaaggggcaggccttgggataagaaaaagtctattattgcaatttcagtttaatttcagttttgctaggtttttcaagctgctggggaaaatgtgggcatttcattttatcccttttatctaagactcctttcctttgtaaattaccagtggtatcttacaagagcatttctgttatcagacatttgtctgaattcatttattttgtttcacaaattcattttgtcagaacacagttctaactccttggaaaactttgttttattggtataatataaatgaggtcagggtaaaatattgtcaaaattaaattgttcttatctttattgcttttggcaactttcacgttttatgtctctgtgcacattctgtaaactgtcatttattttttctcaaatggtataaaatttctgaagcatgctaattatgtatcgtttccaagcgaggaaatgccaagggactggcttaccatatgaagagtcctgcctgtgttttatcagtaagtccttgtggttatggtgatacatttttgtatactctactggtaacttactatgggcttaaaaacctttttcactgggagcttatgcaagtgaatgtggtgtgtttctttgcagctgttgccatagaaataaagaccttttcaaagtaaaatgaggatggcataagaattacaaattcaaaagaagttacgcttctaatttaatatcaaaaatggtgcactattccctttctttttaattttgtcaaaattgcatgacctgagtgcgtctaatatacttttattagataatttctagtatcagaaaagctaaagccgaaaaaatggaatagatgaattccccacagcattcagtaggatgggctttaatctttaatcttttattcttaagacttataatatttctaattgtcttctgcatgctctacctccatactactttctatcttattttccatttaaatctaattacctataatgggctttcttaaaaacaaaccatttattttgctttctttctttaccacatcattttcaacaacaaggcacattttctagcattaacacacacagaaggatgaacaaatctataaaactttctcagattttattactgttcatgttcagactttgaaagccttgtagacttcttttgaaaatgaaaaaaaaacctgaagcagttacacaaattaaagtttataccagaatgtaaatcaacacacagctcccttcattgagaaattcttgctaaaaagaaatgtcagcagacctaaacaataggcttaatgacatggcaaaaattgtgaatttgtaaagattaatatgttaatttggagattattttattttgagataatgtggaaaatgaccatgcatgctgaggtatgatggttattgaggagaaaaattttatcaaaaatattaggattatagaattaattcattgtttctgcaagttaagaaaccagtttattcttacttttttaaaaataaaatttgaatagttttatagacttgcttatttgtctgttatcatcagtattttaaataatgtcaatatttctatgcaaagaaagaatgtaatgtgttttttaatggtaggaaaaaataaaagagtgaacactgaagtttctagagattgttacaatattattctcatagctttacaacagttatcaaagaaacaagtgatgttcttgatattctacatcagtgaaaagttatcttcaaatatttaacaagtttgataaaacatttcaaattttattttccaccaaaagaagatgcatatataggaattctagaatgttgaatttatttatttcattgagaggttgtttaactttaataaataatttatagggtgatttgctttaactgactactgatgaagaattgaagattaattttcaaaatacagcatcacttgctccatttttaaataaaagttgtaaataatattctgagagtctaaaattacttcaaaatttcttcttccatttccttcaaaatatctttgttaaaatgatttctatcttaatgtcattaaaacaaaataatgaagcacttttttaattaattaattaatttctgagacagagtctcactctgtcttccccaggctggagtgcagtggtgcgatcttggctcactgcaacctccacctcccgggttcaagcgattctcctgtctcagcctcccaagtagctgggactagaggtgtgtgccaccacacctggctaattttgtatttttagtagagacgggtttcaccatgttggcctggccggtctcgaactcctgacctcaggtgatccatctgccttggcctcccaaagtgctgggattacaggtgtgagccaccacgcccagccaatgaagcacttagataaaagttatcctctaaaacaatgatccccaaccttttttggcaccagggatgggttttctggaagatttttcaaggactggggttgaagatagggtttcagggtgaaactgttccacctcaatcatcaggtctagtttgattctcataaggagcgtgtagcctagattcttcgccatgagtggttcacaatagggttcatactcctatgagaatctaatgcccccactgatgtgacaggaggcagagttcatgcggtaatgctggcccgccactcacctcctgctgtgcagcccggttcctaacagtccacagaccggtaccagcctggggcctgggggttggggacccctgccctataagaaatgtcaattcaacttgaagtagatatgttaacaagcaaaaagcaggatcatgtcttacattaaaaactatataatagtgtttatttcttcaaagagtgcatataggtactttgtatgggaaatcactatttcactcatgattttttgtttcattgtaattacaaaatgataaaaagttaatgagtgccatagggaatctttatgtgccttatacacactttaaataaagtgtacagttttgtaatttttttcatttttccctaatttttaaaaattttatttttaaggcataattttttgtttgttgaattcagtaatatacactggaatttatacttcatatgtgtttatttcatttttttctagcaattcagctttgttatgttttataaaagtactgattcatgacagattggatattttaaaaaccagtcctttcccatagaattagagaagtgctgatttagtaggttgcattgattataggctaaaactgaaacaacaaaaactttatcaccagcagaaggaattcattttactgaagtatgattagttaagctttttaaaacagtttagccttgtaataattaagagaaatgtgcacttagccaggtcaattctgaaaattaaccagcaaaatatacaatgaattctcagctatgcaacatatgttaccaggacttagaacccaggcagccatattctatataaagcaaggataacatgtttcactgtctgttctgttttattcctggctacctggactagttctgctggagtccatatgcagggcaagacaaccagtagggctaaaactgattatataaatagaatttctgaaaaagtattataagaggaaagagcagtttcctccctcaactctttcaaccttttttccccccggaaaaaagataaaatgaagttaatggacaatttgtgaagaatagtccaacttacctttttaaaattggaagatcccttttacacaaagatttaaacagataatctattatatgaccacttatagctaaaacaccctcaagtttaacaaaaaggacagttatttgatagatttaggtatgtggacagccaaacaagcagaaaccatttaagataagataatccaggtaacggttggtgaagataactaactttaggatcgagtttagacttaatgttgactggcacgaggatgctgagatttaaagaagttaatatgacttgttcagagtcacaaagccagaaattggtagtcatgttcaagtctatggccgaattctgctccctcaatagccatatttttcaacccatgagttgtgatccatgagcaagtcagaaatcaacttagtgggtgacaatcagattttctttgaaatattaacaaatggccagaatacaatagaatatacaaaatggtttaaccaatgtagaggaaaatcagtgtcgtcagagagaagcctgatactgacacagaagtttctctgcctattttcctctgctcagcccgttttctgtctggaggctgccttgattcattcccctactaatcactttgattttccttctcttccagatgtacagcttgtgcagatgaatattaggtggtgggtagagatgctccctctgctgtagagtggctttggtgaagccaaccaacccacagaccttacctctataaggagggctgtttgttgtttgattagtttatgcctctgatgtatatctggttccttgaaatttttattaataaaatgtaaccctctgtataacctcaccaaagtaaaatctcaaaaggcattaattctggagtcttgcaaactcctgggtgagccctgcctgtgtgacccagggaatactacttagcctctctgagtctcagttcttcagttatacaaccgaaataatactaatggtacctaacccgaagttgatgattagaaaaatatatgtgtaaagtagccaatacagggcctatcacatgctaggtattcaataattgctaattattatatcatagttataatattaatttctaagtatttgaacataataaaatcctctagcactaaaaccatggaaaagatttagtgtttcttttggaatccgaagacttttctggatttgttgctagcacagttgcccaggaagaagtgtgactagccagtgggtgtttgggggtgaaatccagcctgtgccctgctaactactaacactgtacctcagtgtagagctgcagctaatagggaaagcactgtatctgctaaatggagctctgtctcctgagtcattaagccagttagcactgtcctacagaagcttggaagtgccagttagtagacttttccatttagtaaagtgctgaataaataaacttttactacaactggtttctttaaagtgtttgtacttctaatgatattctagaacagttttgaatttttttctctttgtcatcacatagatgcttgtaaaaccagccgaatatcaggaataaactatttataacataggttgacatggtactatttgaaatgttttgtggactgcagatgtttcataaggattctttattctttttccttccattccttgatgttatggaatatgtcagaaggcttttttaaggtcaccatatatctaacctcttgaaaacgtatactcttatttcaaagctctaagaaactggtacctggatcactagacccaaatttaacttcagcttgctcagtttacatcttaaactccatttaaaaattgttattgtgctattagagaaaagtcccatatgatacccaatttgtattttgaaattcagctggataaattgaaatgctgaaagtgagttatgctattgcaacactcaccatatattaataactgaactgatatttgcgggataaggtttttctatcagagaaaaataaaatgatgttaaactgctagattccttggatggttagttcttttctggggtgaaagacttgagcaacactagaccccagtatacacaacctcaaaaactaattgaggctttgccctataatataataaatggccctatacttttcgtatttctatattttactactctagaaatatttccatttggaaatgttacctatccacaacagaattcagcattcacagcagttaaatataacaaactatacacacccctgccccacccccctgacacacacacaccaaggataaatcttaaaaacaataatattgaatacaagaaaaaatacataagtacatatatttcttttttaagagtacatgaaacagaaagataatgtaaactcgtgagagtagttatcccaagaggaaggtgagggaaaaaggactacagatggtcaaaaagtatttccatttaatctatgatattttgttgattaaaaaattcttgaagaaaatatctcaaactgttactagttgttaatgctgtgctgtgggaaaataatcatttgttatgttactctttttacatatctgcattttaaaactatctcaacaaaataatttcaaattttttacaaaggttttatctcatgttatctacagcaaaaacaaaaataaaaacaaaaacatcaccagatcttaaagaactttcaaggcataattagtttcatggttttgatgtcgatgctcatctcaaagtatagtaatgaatgcgatcacactttttctcattagtacaaactcctcatttgtctagtacctttcaaaaagttacgtttacttccattttcattgttagctcagtccaaaaacaagaacaaatatttattgagcacctattgtttgccagaaactgctgtaggcagaggataaaccaatggacacaatagactgggaatcagcagactacagcccttgggccaaatctggtgtaccatgtgtttttttttaaataaagttttattggaacacattcatgcccatttgcttacatattgcctttgggtgcttacaatagcagagttgagtagttgtgacaaagactatatgtctcacaaagcctaaaatatttactttaaatatttcttacttttcacaggaaaagtttagtaacacctaaaatagtcaaaaacctctgccctcatggaacttacattctattatggagacagatggccacaaaataaataagttttagtgtggttgatggtgatacatgcaaccaagattaagaaagcagaggaaggggatatgcagtgttgtgtggaagtcagagaaagccttgctgccaagctgaccgtggagcaaagatctaaaatagatgagggccatgtgaaaagctgagggaagctctttctaggtaggggaagcagcaggtgcaaaggtctgaggcagaaatttcaaggaactttaggaggtcggtatggctagaatggtgaaggaagatgagaggaggtcagagagtccacacggaaaggcagagcacagccttgcaggtcattcattataaggagttcagcttttactctgagtaagggccctcatttgtctgttgtaaaatctagactgttcatttcatttagaaacagaggccaaagctatagatactgactccttaggtcaaatgctattcaagtctgaaaacttcaattctaacctcgccagcaatggtaaggatcgccacactgccagttcttaccagtgctaccaggggaagaaagcaagaaaactggtgactatatgttgccacaatttgaaaaacatttctgtgacacatctatcccataagttatccatgatgacacactagtgtcggcactagagagcacatgctatgtaaggttttatttcaggccagtaggttggcctcaataacattaaatttcaaactgaggatttggggtatatttttcttagatatttgccaagaatgtaattgatcactggctctacatctgaatgtgttcagccaccttctacgtgcccctaggcagtttaattcctctgggaatgcttgggaacttctgcacagaagaatgggtagacctttcacagagagttcattccgtggcagctaccatacctgccctccagaatttatagtctaatcatgaggaaaagatcatagaaagcccctttcaaatgtatatatttctcttaaatacctctcagatcttcatatattctagcccactatctttaggcaggtatgtttttattccttttttttccctaaggtagaaattgctcaggctgagagattatgtgactttttcagattcacttaattaataaatgaaagaggatgtactagtggtcaggtatctggcttctcatacaatgcacattttttttctatcctgttttttaagtcaatgatcaatttgtgtcataaatatatgagttagaatctgtatcacctcaatataatatacacccttctaaaatataaagcatgactatgggtaacaagtattgaaagtatgccaaaatagaaatattgctgctccaatcatccaaagccactatgtccacgtttaatgcagacttataattcttgaaaatactggtgaactactattctcttttgtggatctatttaaatagccttatttttttgtgcagaacaaaacttatattgaggaaagaagagaaatattctaataccagactatgagctcctcgagggcaagatctgtgtataatttttctctttactctccaacatccagcatataataaacacttaataaatatacaaatgcttatcattgatacaagactgtctttatttttcccattcatttgtgttcctaagtggcagttgatttctcattaaagtagtaaaaaatctgtaacttcgattgtttccaacattagctcctgtagttttagttattgttgatttttgaaagatttaaattaagggtctgtcttcaggagctcaaacatctaaatgaacgtatgaatattgccatgtaattttatgtttgaatcccatagacaagtgactggatttttctctttgcctctggagatcttgacatcaaatagatttcacctacatgtgttttctcttttgaatggatttaaatcatatttcttcaatttgactttttccaaataatcatctggtaaaaatactttattatgtgtaagaaaaagatcaatataactttacttaaatgtatagttttttctcagttgttggtttgtcagccatgatccaagataagggctttttttctttcattaacccctcaaggctctcatttgcaaagtcaatgggacagttaggcatgtattttttagggcatctttgtagctttgattctatattttaaaagatgcccaaactatggcattatttcccataagatctctaagttattggttgatcaaaatataaatgagacaataaactacatttgcatatttctgtggatgagtttaaacatccttgtttctcctgcaaggtctttcacttgagttaggccagccaactgacatattgctcattaatcatacatattaactggagtagttaatgcttcaaaatccaacttaccattctgtccacagggactggtttgtgttttctaaatgtgatgacatatgcttcagacactgctaattaggcctttcccttgaaaattcatcctgacatgtttcaagaacacttttctcccttgagtacaagttcattaaattattaatatccttttataagtcttgtaggactacttacacaatgcagctttctctgttttcaaaactatagtttataatgaaggatgaaatagatctcacttccttatactgtatatctttttttccagtcaaaaacaatgggctgggtaaatatcagagaataatagatactatattcagttacataaaatgttaatgtaagattaaaaatattttttagcctgggcaacatagagacacccatctctacaaaaaaattaacaatttgctaagtatggtggcacatacctgtagtcccagctacttgggaggctgaggcaggaggatacttaagcccacgaggttgaggctgctgtgagcaatgatcacaccactttacttcagcctgggtgacagagcaagactcttatctcaaaaaaaaaaaagatttgcacatggaaatggaaatggaaatgttatacggtcagctgtttgtatctgtgggttttacatccgtggattcaaccaaccatggattgaaaatatttgaaaagaaaatatggttacatcttactgaacatgtacagacatttttttggtcattattccccaaacattacaatataacaactatttacatggcattttcattgtacgtattataagtaatctaaagatgatttaatgtatatgagagggtgtgtgtagcttatatgcagattctataccattttatataagatacttgaatggctatgaattttggtattggacagtggggatctggaacaaatctcccacagataccaagagatgactgtacatataatcgactctacacacctgtaaggaagtgttataagcaatctaaaacagataacctaaaattagttctattgagcttctgtattaaatgatgaatttggtggcaattttaccttctggcctattatctacctaagcaggtgcttataccaacctatataatatgacctttttaagacgaaactcctaacggcttcacatcacaatcacagtaatgaaactcagagcactcaccataatctacaaggcccagcctaatctggcctgcctgccacccaaccacacacttgctcttctctagcaacctgtgtttctttctattccttgaagaatttgttcttgctgttccctctactggacagctttccctggatgcacctggatgctctttctcagaccttgcatgatccttggactcactttgttcacatttctgctgagggcttccctgatttttctatctaaaacagcacaccttcctgtataactctgtactgccttaccctgctttatttttctgtatttcctatcactatccaaaattcgtatctttatttatttagttcttagagatgcaataagtatagcctagtggtaatggtcagagatgatacagccaagttgcctggattcgagtcttaactctggtgtttactggccccataaccttgggcaagttatgttgtcactaatttgcctcacccttaaaatgggaatacctcaaatatattttgaggattaaatgaataaatatgtgtaagtttctttgaatgatatttggcatctattactattattgtccccactggtatataagctctattgagacagaattcaaggtatttccagagcatggtaaagcatctaacccacaatagggacttcgtaaatacttcttaaattaatttatgaacaattctgggcacatgccagctgaaagtggggaaaatatcttataaaaacacagcgaaaagccagcaggtgaacaaataaagagtttaaaagtcataatggaaattttatgtagttgagaaagctgagttggttatgtgagttttgtaaatgtaaatgcatatgtactagatgtagcaagaatgaggggaacaagatgtatttagggtttctgcctttaggatacttccctagaggtgaacagagaaaaagtcaaagaacataaaaagaatctggcgactgaccaacaattgctgccggcaggaccaactgggtcaccagctttcccaggaaaccctaaccttactttgggaaatgttggatctgatgggagctgagggaaggtaaattgtaaagcacagacttcaaattacttttacccagttacagcttcaggtgacattggatgttaagtttaaggaagcgaaaagtagtattcaaataaagaaaaatactctcggttttgtacaatagtatgtcccaagtgttcagtttttaaaggtcatcgatacattttccaaatatttaaatcaatcatgcaagaaaaagaagtggtgagctgggaaatgccgtctgaacacacttgatctaaagcctggggataagtatcagaagagaagagaaccgaagagcgcacacacgtctaagacaggttaccgcaggtgcatccagggaaagctgtccctgtttgaggacttttcaggggatataatgtcccaggttgttgctgaggttatgtaaatgactttttctacccacattttcctcctatccccatgatccctccactccagagggaaactggagtgctgaggtcatctataaccaaatgaacaagtctgtctaaatgcctgttgcaaataattgtcccttctcttccaccatgaaggcaagctctaggtcttaatcatcttaatatattttccccaacacagcaggtaaaacagacagtaaatttctgccaaataaaacttactcacatctttttgatagggtttttttctgaaatcagcacttaagtatcaaaatgcaatttaatccattaaattcacttcaattaatagagaattacataaggaaaatttttccatttcaaaattgggtgacctttatagttccacctcactgatcctctagagttctcttcatttgtcagacagttattgaatgactgcaaaatgtagttctgtgaacttattttgtactagtcaattcaatcctggacactgaatatgtagctctaaaattctaccccttgagtatatcttttagattatgtaactcagaaatactgaaactatgtcctgtcactttaccttaattgaaatcaagatatccaaatattactaatgattatttgttccaatgctcactggtgatgctgagcttgttcctgtttcacgggcttagcctctgacctgtctgaagtttgtagatgaacttcactacactgtttttattttaacatttctattaaataagacttatcattttatatgcattatttgtccctctgcatgtcaattttgttgactctaaacctacaaacataacagttcccataataaaagtgaaggagaaaagtcttcattcatgaggcattgtgaaagtggaatgttttagagatgtggaagcctggcagcataattctcagacaggaaggcaatgtatataaaggccaaattccccttctccagtatgggagtgtgctgcctgtgaacatccaaatatggaggaaagaacgttttcacaatgagctttcagcttccaccagcttcatgtggcaccaagatgttaaaatacatcacagtatattcaggaaattgtttagccataccctaccactgccccatccatgatactagaccaatgaagtggcttggcaaatattggcaatgacaggcctagaaaacagagccagaagttgggccttagagagttggtggtgtggcaaggcagttaggcattccaacaaatctaaatggaaggtttgggttggcctcagaatcagggtagagagacgtgagggcaagcagaaatcaggcaagcagaggagaactaggaagatccacgttccaaagggaaaagcagcaagtaaatgggacatttacaaaatctgacttggtagtgagaagaagagaagctcaaaaattataacagcaaaataacctaaattgtgaatgatcgggatactcacatcaaggaaacgttaatcctgttttaatgttttaatgaatcatttattcagattatcatttattgaactgtagctcaagaggtttagataatgatgtcacaacttctaacttgttttgaaaagccacattagttacagatagagtccatctaaggggggataaaaggaaaggggcagagagatgagtaaatactggaatgaagtaatttaaaaatgttaagatcccagcctcaataatgttcatctttccttagctctgaacctatttcaagtcatttgttcatgctgaattgcattttcttctcatgtccttacgagagtcacttgtcagatccctgaagtaatgagacctttatgactagtgttgttactgtcatagatacattttaaaatatctattaagaaataaaatgtacttaacatattatgtcttcctcagtaagtattccattctcatttttacacatatcattgagttcaaaatgtaattctttacatcaggcataaatcttatttcctttcatgaagttaaaaaagaaaactaaacttcccagatagtctgtaatgttttcctgtgtaattaacacctcattcacagttgtgtgtgccagtcaaggccctgtctcctctttcctaacatttccttaataccttgttcaggctgagctgatgcctaacagtgtgcaaaatacacatatggaaacaggggaatgttagagagaagtcagctgaattaccgtgacctgccagtttaaagagagtacttagacacaggtttcattttgtgggtttggggtctgtgtgccatcccttaagtccaattactgctgtaacctcatcttcttcatcatcatcctcatcaacaataaaaaccatctgtcaaatgaataccaatagtccattatttgcattcttctcttcttaatgcttctaagagggccaaatgtttataaatcaagtgtctaatttaagatacacgttctctgacactgcaagtcatcctggaagcattaggttatttttactgttgaaaatttgtagatgtcattgatttaaatagccttgtatctttttttcttgctgttaatagtgaccctctgtgtccttgtgcacagaaaatgcaagtggaatcaagctttagatcattcaaataaaatcattccattgtgggaatctcctggcttcatttttaaaagttatattgaaatttaacatacattaagaaaaatgtgaatgtcataagggtacagcttgatgcttttttataaaatggacatacttatgcaaccaccacatagtccaagcaacagaacatcatcaccccaagaaactcctctcatgctttctttcagtcactttccactctcacatgggtaacccgttataacttctaataggatagattaggtttgcccattttgttctttgtatgatttgatcaacattatgtttatgagaaacatttatattgttgcatgtagttcaatttcattcattttcattgctatcaaatatatacttttccattgtatgaataaaccacattttttttatttctacctctaatgggtatcttgattgttattttagattttttaaaaaactcatatccacagttaaaaggtgattacacttttctaaaggatgcacactacatattttggaggttttcctagagacattatctaacatttttatataaaaatggagaattggagagagggtagtagaagggcaatgaggaaaggaactaatatttattagaactaccatgtactggacattttggtaaaaatagttgttttcttttgaattgtggtaaaaaatatataacataaaatgtaccatccttaccacttttaagtatacacttcagtagtgtcaagtatattcacattgttgtgaaacagatctccagaacattttcattgtgcaaaactgaaactctataaacattaaacaactccttttttttcctcttccttttcttcagtcactggtaacccccattctattttctgtcctatgaatttggcttctttagatacttcatataaatggaatcatagagtatttggttttctgtgactggtttatttcacttagtataatgtcctcaaggttcctccatgttgttgcatgtgacaggattttcttcccttttaaggctgaaaatattccattgtatgtttgtacaacattttatttatccattcatccattggttgacatttgggttagttccacctcttgtctattgagaataatactgctatgaacatgggtatgcaaatatcttttcttaaaactgtttccaattgttggagtatataaccagaaatgggattgctagatcatacggtaactctatttttttttttttttgagagagggtctcactctgtcacccaggcatgagtgcagtggtgccttctcagcttactgcgccctccacctcctgggctggagtgatcctcccacctcagcctcctcagtagttgggactacaggcatatgccatatgccaccatgcccagctaatttttgtatttttttttttttagaaacggggttttgccatggtgcccaggctggtctcaaacttctggcctcaggcaatccaccctcctcggcctcccaaagtgctaggattacaattttacaatcccatcaaccttgcacaagtgttccaatttctccatgtcctcaccaacacttgttttcagatttgttgatagtagccatcctactgggtgtatgcagtaggaattttaccagtgatctttttattcctttaacaaagttgttgcaaagtataagtaccattttacatcaatgaaatcttagcacaaaaggattctataagagaaaaaatggggcacagggattttccagtccaggtgctcttgaacttgacaatgagcattttattctcaaagttccacataatcacaaaacaaattgaattcttttgttctgagctgcaagatataaggtgctctacaggattgcctgactttaaatatgaaataacagctttagttttagagtagtggttctcataacatggtccccagaccagcagcatcagcattactgcaaacttggtagaaatgcagattctcagatctcaccccagacctactgaatccagaactctgaacagccaagcaggtggcacacacctgtaatcccagctactcagaagaggggctagctctattaccgtgacctgacagtttagagaaagtacttaaatacatgtttcatttgtgggtttggggtctgcatatcatcctttaagtccaattactgctctaacttcatcatcatcatcctcatcaacaacaaaaaccatctgtcaaataagtaccaatagtctattatttgtattcttccctttttagtactcctaagagggccaggtgtttataaatcaaaagtctaatttaagataaatgttctctcacactgcaagtcatcctggaagcatcaagttaaaaaaaagagctttttaaagctattttttattgagacaggatccatgctggtcttgaactcctgggctcaaatgatcctcctgaggtttcctatgactgatttattttacttagtataatgtccttgaggttcatccatgctgttgcatgggccaggattgtcttcctttttaaggctgaaaatattccactgtatgtttgtaccacattttgtttatccattcatccattcatggacatttgggttacttccacttcttgatcctgaggaggattgtttgagaccagcatggatcctgtctcaaaaaaaaaaaaattctgcgagtgaggctcagcaatctattttaaaacagccctccaggtgacactcatgcatgctcaggtttgagccctcctgggtttagatcattaggcagatatctaaattattgtctaataatctccacactgttgccaaacagaaaactgacatattgagcactttcaggtttccagggcaacttaatagagtaaatctgtgttttgctctttataccacagttttcaggaaaatgttggattagcccagttataataatgctggaacactagatctctatccatctgaaagttcacccaaacactaatttatcagagttgcttctgaacaaatggccacctgagaatagccaccctaaccaggaagacttattccggctcagcagatatctgacttatctccaggattttcactccacccacacccaagtccccaccttttgtctcacttttgggtctagagagagccttgtaatgaatggaccaaaacagccagagatagaagtgaaagcaaacatgcaaacattcctcccattggcatcaggagccttcttcctgtacctactaccaaccgccgcaggccctggccccagctatcctcaaccacttccccagagccctgcaaagaaaataacaaagattcacagattagactttcctctgaaaagtgggggaatctgattttagtcctaggaagggagttgtggtttatgccttttttcttggcctaattattaataaaatactcccccaaagtatcctagcttaaggagtaaaattcaccctaccaaaaatctacagttagctccttttttaaaaaacagaacatttattgtgtgactaatcattgaaattcttaagataaactggatgctacaacagctgccctcttgggtttagatgttgttccttctcagaatccacgcctgaatctgcggtatacaatattcaggtgcctcattcgaccagtcctggtattatttcatctttaagccttggcacttcagttatacttcctcttgcacttagcagggtagccacatttgccacaggatgacttctgaaggtggcaggccttagagccacagtggtggcacaatgtgtgcgtcttactgcaacacttttcaaacgatggcgttcccttcagtatcttgcttctgtggccaagaccaaagagtgttgttagctcttaggtaggcttttgcctttccctaatgcttttaagtagaagatagatgatccttcagaggaacaggagacagtgcggctgtattcggtgcagcttggggccttgaaggagggaaacaagacaagggagttaattcctaggggtccttggagagaagaacaatgatgtctgggagtaggcatggactattgtgttgatagaaattgcagcccctaagaaaggtgccatggctcacacctgtaatcccaacactttgggaggaggccagagccggagaatcacttcagtccaggagttcgagaccagcctgggcaacatagtgagaccctgtctctaaaaaaaaaaaaaaaaaaaaaaaaaattgagaaaaaaagagattgtgccctgcctggacccatagctctgttatgctctaaagcttccacccacatttctcatccatccacccctctcctctatcctccacaagtcactgatacttgagacttaagtctcaagagtttttcctaaggtgaatcttgtttctagtacagattgagcatccctaatctgaaaattcgaaatctgaaatgctccaaaatccaaaactttttgagcaacaacatggcaccacaagtggaaaattctacacctgacctcacatgacaggttgcagccaaaacacagtcacaattttgttttatgcacaaaattatttaaaatagtgcataaaattactttcagactatgtggataaggtatatatgaaacataaatgaattttatgtttagacttggggcccatccccaagatatatcattatgtatatgcaaatattccaaaacaaaaaaaaaattacaaaacacttctggttccaagcactttgggacagatgataatcaacctgtatgtatttggtggtaagcctaacaaaaaggtaactgcactgctttgtatagcacatctttaaaaattgttcaaatctgatttaaggtgctaatagaaattcaagcctagaaactacatttaatgtgaaaatatgtgctggccaaagttgtgtgcacacaatatgttccaattacttagcaacccccaaaaatattttacctgcatgtccactcggcaaaatcagccttctctctgccctcttccagcatgcacactgacactctgacactctgacaatggcaaggctggctgaaatcagcagtgaagtgcaggaatctggatgcttgccctcaccatatcctgaatcttggatgctttttactcctcatcttaacacatgccaatgttatgttacaatatctgacatttggtttgtttcaacattaactctgcgataaaagttaatcaacagtcagcttcattttccccgcttcctgcccaaatcaatatacatgactcctttgaagaaaggggaatgtaaactaaagttgatcctatggttttaacttacctcaacctaatgtatgcttaaggaaagaaccaatcacttacctagataccattgatttagtttctttgtgttgttgtgaattaataaattacagtgtttccactttctaagtaaactttttatcattgattagtcctcagaggcgaatttacttatatttactaaaagaccaaatatactgattttcagaaaatgtaaactgcaagactagaacatggtgtacatgtgtataacttgttttaagtatagagaatattaaattatatgttcatttcaatcttacaatcctccaaaagaactgcatggtttagatctataaaatgaaagataagagaaaacactactattaataattatatttgtgtttttaattttttttttttttttttttgagacagagtctctgtctcccaggctggagtgcaattctcccgtgttcaagcaattctgcctccagagtggctgggattacaggcacataccaccatgcctggctaattttttttgtatttttagtagaaatgaggtttctccatgttggcctgacctcaggtgatccgcctgcctcggcctcccaaagtgctgggattacagttgtgagccaccatgcctagcctatgtttttaatttttaaaaaattttaaatctgttctgtagatgttaactagggctatttatagaaaaggctgctgttttcatataaagtctttgatggtatcacctaatttcccttcaggaacaatggacacatttctcatccaatcccagcattgtatttgcttgtttatctctgaaaacttactctactgtttcaactggcatttagacctcctaccccacttcaagactagatgaaaatcagaggaatcaggcaactttgcctgacattttcagagcaagaaaattggtgaataaaatgggcctttctgtgcctacacttataattctcccccaaaaaagcattgaaaagatcaacctaatatctttactttataagtatcaataaggcttaatatgtacagacagtttaccaatgtgataatcaaatagaattgttagtaacaatgaaatagagtgaccatatttagaaaacatatgctcataaatgcttctcattcaaaatgtatgctttcaatacctaagctcacttccctcttttaaaaatttaaaaaataaaaaatgtttaagaaaataattttataataaataatgaaatgctttttaaatgttattagattcacgggtacttagagaggttagcacaacatcttgcgattggaatttagctagttgtgaacttgggagagttaatatttggttgtaatcatgaagattaacatgcaagaattatacattttacttcacttataaaaacagcttaaccatctaaagggaagaaaagagctaatgtgcttcattcagtatatgtaattacaatagggcttagggcagtgctttccaaattttagtgagcataaaaattatctgaagtagttttaaaaatgcagattcgtggctccgacccccgggattctaaaccgtgaattctaggatgaagtccaggaatatgcatgtttaacacccaaactcaccctcaaataactcatacaaaattagaattcagacccctcttggacaacaccaacataagatgacagatgtacttgttattgcatccgaaaccacagaatcatcagataaaatacccatcttagaccatctttcatatactttatattactttgctaaagaaccaaggtagatagcatttaaagggctgctgataaaagttaaggtttattcatttcaggtactatacttctcattatggtccttaaaaattggcccacagcttttaaaattgatatttaaaagtcatgtggaattggaattgtttcttaactttctgttcatttttactgtcttcaatattcccatttaatattgtttgatattaaaatataatggagtcacagtatttatcatctattcttctttggtttcaagggaagacgagggaaaacaggacctcccggaaaaccaggacccccaggaccacctgtgagtaagcaatacaatgactgtccctttaaagagtctgtctttatgtctgtgtgtttacctaaggattattttactcccctgtagataatgatttcctttattctactgtttagaatgactggtttcagcatttggatgagtagttcatactctctatattcctaactccatcatcaccacaaaccaagagatgagggaggctggtaattgtccatacacctcacccacttctttattacacaaatggcaataacagtagtgtctgcttgaacatcccaagccaagtgtccagatagatgaatcctgttctgaacctacctgaacaccatcttctagatttcttaacatccaggctgttagaaaatcagacatctggggaagcatatccacttttcttgatatgaaactattttgttagtataatttcatgatttggtaaaaagtgctataaagatcatctaaccagttagcttatctggatcctttaccccaagcttctagaaaaaaaaaatattcaatttcttgtagttctggtaactctgcagcctatgagagtctggtttgtgtccaagctgctccactgacactgcactctctgtggtcaccaacaatctctgcattgcagattccctgagcacttttcaggcttcttcttactttactgctacacagaaatgtatactattgactgctctctccttgaaactccctattctgttggtttagcaacattgggtttttttctcctatgcctggggccatctttttgtctccattaacagcttttcttctaccccctacatgttggatggattaatgaatgccagttttttatttcaacccagacattgttgctgagtcccaggctggtacattcctttattttttagtatctccacttggaagtctcctagctaccacaaaagtataatgtccaaaactaatctctaaaaataatcctagatttttttgttcttcatcctcttcatctaaacagtctctaaatcatatcagttctacatcccagtagcccacaaatcctctccgtcttcactgtcaacggccttagtttagacctctgtcaatttgaacctatatttttgaagtcatctgagagctggtctcattgcctctaccttctccaagtggagcaaaacctctaaatcatgacagcatctaggtgggcttggatggcttaaaattctctaaaagcttaaaactatttgattttaaattcctcaatcgcttcttttttcttcaagaaagatggattccacatcctctacatgccattctgggcccttcatggtttgccttttacctgccttggcctatcctcctctatgcccttccttcttttgtaatcagtaatcttcgcttactatttcaaaaatgccatcacttgcaaatgttctccagtaggcctatatatgcttctctctatcttcatgactcagctcaaacatttctcctatagaagctttgccagtgctctcagcatttgaggtttcctcccatggtcctgtatcttacacctcggacagacacggcatgttactttggactcttattttcctcatctgtctgaccactgcactgtgacttttttgaacctctattttctcaccattgcttagaacagtctctagcctatagcatgtgattattgtttatttaatgactgagtaacaaatgaatatattttgtagacgaaaaaattaaaaccaggtaagtgacctaaagaccaaaaacaccctgcaccaccactagagggcctcaacccagtaccctaggaatctcttaggatgtgctcacctgccaaaaatgaacatgattgctgtcctgtcattgatttcatttcactttagccattctagtggattgtcctattaacaatgcattggtgccaattgatatttgttatataaaagcacattgggggaatgagggggtgaggaagcatgagctgggtgtctgcattagtccattctcatactgctatgaagaactacctgagactgggtaacttataaagaaaagaggcttaattgactcacagttccacaggttgttcaggaggcatggctgggaaggtctcaggaaacttacagtcatggcagaagggagaaggggaagcaagcacatcttcacatggcagcaggaaagagcgagtgtgaagcgggaagtgcacttttaagcaacctaatctcgtgagaactcactcacaagacagcactagggggatagtgctaaaccattagaaaccaccctcttgacccaatcacctcccaccaggttcctcccccagcactgaagactacaatttaacatgagatttggttggggacgcagagccaaaccatatcagtatgctagaatctagtcttttaaaggcatcagttttgttgatttttatttcaaagttttaggcaaaacagagaacacattgtaagatctttaaaataattgtttcatgctttaaagaagaaaagctggtgaatgctaacaggcaagattagaccttcgtgtagttttctaaacctatgatgctgcttttaagacaggctaattgttgtctcaaaggaggaatttgaatgttgaaggcctttatgacaagcttgccaaatgtgtaggagagaagaggattacaccgaattctggaatgagttctcaactatagatcaaatgagtttactgaagaattcagaagattaaaaaacatgtgactgtatgataggatttataatattcaattccgcagactttagtttgttgccagagtgtttgggggagagaggtgcttatttttatttcaaatatagatttagaacttaaactcagctatgggtctgacacacagtgttcattaaatcctgggaacataatatttgaaaaaaatggtttattaactttttaaatataataaaatacccaatttgttagaaaaattaggaaaaaatctatgcagaagacaaagtgtttactttggtggcatgatctcggctcactgcaccctctgcctcccagattcaagcaattctccagcctcagcctcccgagtagctgggactacagctgcgcaccaccacgcccagccaatttttgtatttttagtagagacagggttttaccatgttggccaggatggtctcgatctcttgacctcgtgatccactcgcctcagcctcccaaagtgctgggattacaggtgtgagccaccgtgcctggccagtattcactatttttaaagtatcagcagagcacttgttatctcttaggatttcccagggagctatttgtattttattacaatttacaaatagcttaagagatgttcccccttaattgtggacatttttagatcaaaacattattgtttttcatttatatttcttttccaacattgaaccctttatgacatgcatcttactttatagcaagaaggaagtcaagaagagaacaagagacgggttggtaggatctacagtttttctaattgttactggagttagtatatacctcgccccagtggccagtatgtgagaatcctgaagcatgtgttagaatatcttacgaaaatgtgaaatgtattttttaaaaaattttaattttgtctcttgtcaaacagtaattaaatactatgtaatatccctcaaataagtgaatattttatatcatttaaacattatgtttgagcaattagtctttaggaaagttggagggagactttattctagtcagcatgattgtctgcaaagaacaaaggaataggaattaccaggaggcatgatttttttatttttttaataacagcatactttataagaaaatgttcttccctttgggggtttaagatgtttctgaaatcaaacatagtgttgttattcgggggagtgtcagtgaagactttaaaaatcttgaattgaagggactctaagtccccaatggcctgaagcaattcaaataaagtgttttaaccagtccttctacttgattatttgttctgaagccaaattagtatattctcagtttcttacaaaatgtttgtaccaaaaggacaacttgtttaccaaaataatttctgacaaatagctaagtgtgtgcgtgtgtgtgtgtgtgtgtgtgtgtgtgtgtgtgtgtaagaggacaacgttttgtcccctgagacattatatctcctagggaaaaaagatttctaataacggaaaatttactaacactagttttattaaactaacattattaaattatctttgtgaatcagtgtttcatggaaagtcatgtatatcactccaatttagcttaactattattcaatagcaactttttgtgtctttaggacttatttgaaatttatacacatgcaatatgcatataatgaaactattcttaatcagagtgcttgtcattgaacagtgactaacctggttaacagagctagctacaatgtatttttgtaaagtatttgtccaattccttgttaaaaaccagagctgatcttacctatacaaaggaaaaagctcccaaagtgtcccatgtaacttctgctatcttgtcctaagcgaatattcttcattggagggaaactattacatagagatctcttggatttatttcaatacataaagattacgactgagaacagtttttcagtatgagagggctaagcatctccctcgggaaggaaatagcactaactcctgaggaaacaggttcagaggaaagagggatgaagcagaccaggagaatgtattaccatcacgagctctgcattaagtactgtatttccagtgtcttagggaatccttacaactgtcttgaaaagtagaaattatcttcattttataatggggtaaatgatacttggaaatgtcaagtaacttacccaagatgacacaagcagtgaagacagaactgaaacacaggaactgatccctaaacctttattctgccagacttcaggtgtgaaagacaagcttctagtttacagttcaactaagattattcttcctcaaacatcatacctagaacaatgtttgagttttccgttgcaatcaatggcactatcctgactccagacagcgagatggtataggatagcataggatggcggtgaggaacttagtccttctcctcactagcttgtcctggaacaattttcttaatgtttccttgtctccattttcttttctgtaaatttgaaataatagcacctaccccacctactttttcccacagtggctacaagagcccaatgtcattgatatgaaagaactttcttctaaatgtaaagctctatctaaatgtatcttagttccactgttattattctgaacacccattcacactgtagagagaagagattgtcttcaatcagtaattaaaccaacacttcttttctctctttacagttctccaaaaatctagttaacagaaatttgaatgtctatcaatgaattgctgaaataaaagatcactttgcatatgtcacacttattctagatacgtcatgaagagatccaaaagttattcccaattaggtaacaataacaaccaggtctaaagagtcagtgatgttttttctcccgagatttacagcctcttccttgcttgtggggcttgttcctttaccatctgagctgttgcattttattagttgtgatgttctctaagtctcaactgtccttcctcacactccaataaaagcttgtcttttttaaaaaccttccagttatctgagtagcataagcagtggaaagtaatagacttatgttatgataatgagacttggaaagtctcaagacttggaatgcctttgtttatttcaaagtattctggttttcagttcctttagaaaagagaggaaagcagctggaaatgaggcggagcaggagagaaagtaggagaatttaactaatgagccattaaaggaagtaggtattagcccatccatttgacattaactttacttctcattcatcattactggaaaaagcgtttattaaaaaccacactaatttaaaattgtgttattatttcttctgctacaggcaagactttttattttctttctttttttcttctggtattgtttttatgcattgtttcattattgcagtatgagaattgagcagtgggctccatttgtcacatttgtgtgcatagcaatttcagttgaaaacagaaattcaaaaaattttgtaacatggggcaacagctccatctactgtttccataggaaaagctctagtcaaagaatgacaatagctctttgaaggatgtcagaggaatggaaatttttcgatgtttgaagcttataaatccatatgatttttaaaaaattattttcaggattttgttacatttatgcttaccttgaaatttaaatataagtgctatttcatcagcagtcattttcaatgtcaacttgatgctcttttgaggtaaaaatccatacctacttcatggatctctaaaatgcccttctattgtacaataccaataaaactctgcagcattaatttttgggagcttactccaacaaaacatatgcttcttttctaaaacaagtctgatttgaaacatgtacattcatgtttctattttaattttaacttcagtgtagaacttcttctacctttaaagcatgaatcattgcacagtcctgaaagttacaattatacatcagtttgcacaattaaaagagtaaatttagggtgtaaaatttaatttatttactaaacaaatacttatggcctatctactatgtgttaatcactattacaaacattgaatatacagtggttaaaaacacaaagcaacaacaaactacagataaggtctctacctttctttataacttactgtctgtggtgaggcagtacaccaatggttaataagcagttaaataaatagacaaaacaatttcggtttagagtgaggtgctatggggggaataaactgggtaatgtgataatgatttggaaggaggagatgttcttctcattaccatctaattgaggtggtccagggaggtgtctctgagcagaagacattccttgagaaggagctggccatgtaagggccagagcaagaactttccaaacagaaatatcaggacttgcaaagagcttcaggtggggaaaagcttgatgtattcaataaacataaaggagctaagaaaagaatagtgccagaaaagatttgggagctgaatggcttcatcatatagggccttataagaatggaaaagaagggttggggggcaagtggagagatacacgtagccatgaaataaccagttacatctccgttttgtaagtgtgtgtgtgtgtgtgtgtgtgtgtgtgtgtgtgtgtatctgcagcggtttgatttttttatgtgatgaaattactgttcctactgattcaaataaattattctgaaggtaatattgtttttagcccattatctttagtctttgagtggacggggaataggcttgtttgctgaaagaaaacaaaattgacaaaggtttgattgtagcccatttaatttcagtcttgtctgaatccactggatatcactttggtcattagagatggagaatttcatcacatctaagtcttttctttttccccacagctaaatctgatgtttcctttctgataggctataggttgagtcagttgaacagttggggcaatgaaaatacataccctcaaaacgccatagaactaagtgccttccggcacttgtgcccccttatccatcgctgttctcaacttgagtatcttccgtctccaactttatttactatgcactgaaaactgaaaggaaagttattattttcagcatatagcaggacccacctctaaaacaatttagtgtcccaaaacacatttttggactgctgaataaagcagatgacaaaaactgtctcagtgaaacatttgatcacttgttaaaataccctcagaataccttgaatgtgactacatgcattttgaagctcatcatgtatcaatgggaatccaattcaaattcttaacatcccttctagaagcttgaactgatcagggcttagtcatgttgctcagttttcctttcagcaagagaaccacaatctcttctgttaaatgactaaagtctgtgcaatgtaatatcttcagagaaaatgaacctaacaatttatttgagtcaatgggaataggaatttcatttcttaaaaaaaagtaagatgacactttctcagatttaaaaatatagacacataagacctataaaatggagacatggctagttaatcatgtttattgccacttgtccctcatgggggtaatggtcccagacaaaacagctgttcccaacattgctaaaattccagtgtcaccttgtgtgaccacagaatacatagacatgcatgtgaggcagctggggatatcaggttgagattttgaaaactggctctcaggttttattttctaattatttctctttttctctccctacggacagcagcagtaggacattattagtcactttctgacttcctgtgttttttactaatagtggtaacattatggtggaaaaaatattatatttgtacagccactgactgcttgtttcatcttgtattatgttcttgaaaccaactattaagacatctggactgacatgtgttatttacagcaacgatgagacagactatttgaaatccttgatctgtggtcaccaaacttgtaattagttgtgatggtgcctggattcaacatcatttctttgtgttgggtaaacattaagatttgagaagtcaaaggccagtcagatttattagaaccttaattttcagaacgggatatttgtttcctaaataatcttatagtttgcatttgatgatatagtttccaagaggatctccatactgtatgtaattttactgctgtatatctttgtgaggtaggcaagaaaagattattttcatttaataagaatattctaggtcctgatgaataaggagctcagctcaatttttgcagtcagttttctctgcacatcagtaactatagcttagtatgatcaaagtaaagactgaaggaaattatataactagagaagcaacaagttttcagcattgtctaggggacctaaaacatggaagaaaagttggcagaaaataagatttgaagggtcttcagctatgtctgtaatgaattcattaaaaagtagaaagacccaaagcaaatatcgcaaaattgttaatatttgacaacataggattttggactcattgcaatttatattattttctgtacttttcagcatgcttagaatagttcaaattcattttaagaagcaggaaaaacattctatgggattagtaacagttaatatcactgattacttcttcactggctgatatcatcagtatcttctcctttgactgaaatcctttgtggaatggggccacgtgttttaaaactaaaattattaactattttttagaactttcctgagcacactgtctataaccatggtgttcagctgagccaagaattgtcatttgtagatttatcattagcacaacctatagataagggagagaccttaacatcacacatttgagttgaaagtgaggaccacaatcacccaattattccagagctgcccagaatgtccccagctattcaaattgtgcacatgctcttggcctctatgtaacttggcagtgtataagctagtgccaccagcctggttatcttaagtcccagcagtgtgccttgaaacttgcattttcttaactcaggaagagttgtcattctaccaacacttttaaagagaatgaatgttatcacctaattacagtaaatggaaactcaaagcattcataggtgtgggctgcctgtggggtccatgtaagccatctttcctccagattttggtggcatattgaaaaattcctgaggtcaaacaaggggatggaggcacagttgttcctaaggtatggtttttgttggtggtgatcttttgaggacaccactggatacaaataatttgtttcacacattcccctccttgctagttttcatgcccctgtggcttttatcaccttgtactgggtcattgatgttgcatctgtgggtggcaaggcactctaaagattcctgctgctccttatattgcaggacactgacaaataatatttttcctttttcaggacatactggggagagatgagtatgaaacattttatggatggataagcagaatagcagcattaggggaggaatctttttttttctaactatcatgccatggagatcagtcaaaatgtcccactctatcaataaggcagtgggctttacaccaattaggttgatatctggggaaataagtacctttaaatatatttttttctgccttagaaaacaaagtgttaaaaaatctacaagcttcctagcataatttagaaaatctgcttttatgaaatgggttaattatgcccattgaatgcattcactgtcacagtctcatcctcccacttctgttccaaaatgacaagtgaaaccagggactgtgcaattttggaagacaatcagatcacatattgagtattttgcttattcatacaaccataaacggcctatgcttgagttccctcaattacacagctcagtatgcaggccagaagcagacaagcccagctcaagtgagcactttcctggaatacacgggggaacgagtttgaaaaatgtccaaagtggcagatgtgaaaaattctcattcaacatccagagctgcctttgctgcaatccttcacctgttaatcgcactgcctctgaacttgtgaaccagggatgctagcgatatcttagactgagacacttaggagctatagatctttcaaggtatggtgccagtatatgccaaggtgggggaaaagctagcgagacaagacaagatcatggatcacagcactgctcagaattttcagacattcaccaagaataagcatgtcgctgccagcttccaactaaactgttattatcttttgtaggggaaattcccaaaagatgtccttgataaatgcttaaaccattgtactgtatcacttaaattcttcagactcctgcaatgctaatacacaatctctcctccacaacagaatacaatggcactattgtagtcttaagtgaaggatatttcattttccctgagtgagacaactttcccacaactgttatccactgcaatttcatgctccttggagtttctgtgcaccaaaatcatccccaagcaatatactctcttgattagctagtattttattccacctcctttgactatatttattttttcttttcttccaccatcttataagcgcgaaggctccttgcccttcatttggcattattgaaacctcaaaagttatttaagatgctggttgagattgttaacttccttccttttccatctcagcctaactctgatctttctttctcctgctctctttctagtagaagccctccatgattttgaacttccttgtgtctctgtgttgttcctctctcttatccttacccctctcccattctggtcactttcctcttgactcttcttgtcatccaagtctttcttttttttttttttttttttttttggagatggagtcttgctctgtcactcaggctggagtgtagtggcgtgatctcagctaactgcaacctctgccttctgggttcaagcaattctcctgcctcagcttcccaagtagctgggactacaggtgcacgctaacatgccctgctaattttttgtattttagtagagacagagtttcaccatgttgcccaagctggtctcgaactcctgagctcaagcaatctgcccgtcttggcctcccaaagtgctagcattgcgggtgttagccactgtgcccagccctttcaaaaggcatgtctacaccaagtctcagaccattcttttcttggcccttagtgattgtatacctcattaatcctgtgatctttcaccacacgatgccctgctcgattgtttaaaaaccagctttaagatgattggtattttattttcccatcatccttctcactgtgaggtggtttaggggaaagagttaaaagatcaaggcagtggggtcagacagacctgagttgaaacctagctcttgtctactatttatatgaccttgagtcagatatttagtcttttgttatgtgtaaaataaggaaacaccacctcactgggctgctgtaagagctaaatgcaataatgcatgtacctcatacagttgtcactttcaaagggtaactattgttatttattaatatttttgttatcattatcctcatttaatcattatttgccatcttctcattatttttgtctttctttcccaggatttaggaactgacatttccaaagcaaaagggttgatattttttctcttttattatcacctgcatgtaaatttttcttctatctgcttggctcccctccttcctattttcctctgttaaagtctttatagagaaacttcatccatctaagaatgttggcctaaatatatgcatatacatattcatcatctggaaaaactcattagattctattttcaatgtgaacaaacacacttgaaaacatctcttttaaattgagagcatttaagtttcataactgtattcttttgtattgaccaatgaatgaaacaggtccatcagattagcactgaaacatgaattttccctgagcttatttccatttgagtccccaccacttacaatccaagttaacctgaagacttggctcacaagtcatttctcaaagcctctttccagaaagtgaaagccctcagcctaacggtggtggaggcagagatgcagtctgcagagtcctcagcctccctttcctacttggtactgtcttctcctgtccttagcccccaagggccatccctttattcttctcctttcctgtcctacccgccttgctcttgggaaatatgtaatgaacaattcacatgaatctattagaatggaatgattttggacttggttctaccattcatgtggtttggggaaaaatctcttggttttcccatctgttaaatggaaaatataatactacccacttcagttggttattataagaatcaaataagataatgcattttacagtcacattaccctaccacccaagaaaatataagtgaaaatacttttagaattatccagagctgtgaaaacatgaacctttagtattatatctcccaggaacatttgcatttgatctggcagtaaaacctaacatcaaaaaaaataagacttttgttaggacattttgggcataacctggagagcaggcaagatatttgaaggaaaaagacctcctcccaggaacctttaaatttcacctatatgtggcccatgttctctagggtgacccatttaatcccaagtatgagagcttgaggtctctatattgaaatgtaagaataatataaatactcactgaatctgctcttggctttaggaatcacattttatagttcaagagtttctagcagttgttgttttttttgttttgttttttggtgttttgtttttttttttttttttggtggggagaaggtgttggtatccctttagtcactaaaaattctcaacagaagcattctcagaaaaaaaatccattacaattataactgcttaatttatgtaattaaaccccaagagacactgaaaaaaatttcattttgagtaaatattaagacagagaaaaggatgtgtgtcttttttaaaaaaagaaattgagtcccccaatattttctatctaaagaacattattgattttttcccccagaattactttacaacttatatgttgtaattctggtccaaaaatccatccatgagctcttttctacttaactggagctcactataactatgctttcaattaactagccacattcttaggttaatctaaatctgttggtcttgtcttttataaatttggaagaagcaagccctttgctctgtttgataccatttctaactaaaaccaaaaccaacaaacaaaaaaatggctttctccacagactttttcttataaaagcaatgattctaccgaattcaacaaacattgggtgctggtgatgggagacagatactgcagactgtagtgtgctgagtttaaaaggatcaaaactccttgccctcacaaagtttttgttgcaactgggaatacaaacatgtacataagccactatactcaatgtaaatgtgctttactaagttatgtataatgtgttatagatggaaacataaatgagagaaaaactcatttgacattaccttttccaaccattattattttttcatctcaccattcctatgtctgaatttaggcttcctaatgactgtttttttttcttgaatacaaagggaaaaataattactgatctctacttttttacaagccattagaacactggaaatgtttcttgaaaattagtccaaaggactttccaacaagcattctatctgttcttacagaaaagcgattttttagcacttttgaagagagttggttagtacaacttccttcacagaggtttttggtatttcaaagattgttcttgaatttaactgaaaacccacagggccaaaagcagctgtgtgtaacctgaaaacatgtaattttgaatccagaaaaaagcttccaataggagattgaagagctatggtgcataagtggcatctggatggctcaaggagactcagtcaacagagatgaagaggtacagggtacttttagagaaaagggagaaaggaaaatagttcaagattgaggatcagagagtgagcaggcgatttgactaaggagccacagagctcctgattcacaatgtgcagagtgtgctaaagctggatcagaaggctcaagctctgacttgcacagacagcttatggcaaagaacagtgagggaaaaaaaggcaaaaatattgctctttaagctaagtataccgggtgaattggctaaaaagtgaaaatgcagctaagactaggactaaggactatggtttttaacagagaactcttcccaacttttaaactttgggaatgtgcagccaaaactgaaatctactaagggaatgataatgcaaatagctcatcatttttacactacgtgtctgacaagtccggtggcagacatcatggtatttctgttttccacctccagcaagatttaagccaaaaactatttaaaagctgctagaactattgctgagagtatatacttcccaaattgaatatagctttaattcactttatcacacctgctgtagttctttgcagtaagaaacgacatcaggatctctatccacaccaggtttataggcctctcagataattatgaatcagtacagttaggttcagaacagttgtttctccctggagttcattagcatattttagctgctctgtaattgtatactcaccacattaatccagatgtcctatatctcccaatcccatacaaatagagtgaagcaaatctccgtaaaaaacagacattgtataggcatgacttgtgtacaatcatgttgtgggtcactgttataagcaagatattgggacatttttcctttccataaacctttaaccacttttcctagcagagctcctaagagcataagccaaggctgacatgccctctgcagttggcctctcttcaccactggacctgggtcatctaagtgtcttttgatgggtccttgtaaatgcaaacctcagagaaagggttctgtcaactgccctagagcatctacaccaccatgtgatgccgagagatctgtcacttaccacaagtctttaacttctttcttggagttgattggtagtctgcaggatagacaactcttgctaaacttggcgacaactccttggatcttctccagccatatttcataccagaatagaagatagaaaaatagcacatctcttgggatgtggctggtaggatagccaccaattctgaaaccccaaggttgtgttccaactgtaaacagagttgacttttgcaatttaaatgcttatagcttattaatgaccactatctttgacagtgttagagcaaccaagtgagacactgcctcactgactatagtcagagtagagggggacttccagaagactctaattggcatctctttctagtctctgaagggttccttcggaccgctaggagagtttgtataaagtattgcctgcagggtagacggttggctgtaaatttctgtcacattaaacttgcaatttgtggtacccaaactatcccagtgactaaaaaagtgagaaagaaaatgtcatcataaatactcatgatgagattaagtggtagaacctaaaacttcagatcaaacccatttcgagtactactttgaagataagacattttgtgacaaaagcagaacatatgaaaatgtagaagtaatttttatgggtttattaatcttgtggatatttgaataataacgttcaaccttttctgtagcctcattgctcttggcattgtttttagtgagttgtgcccttgcctttgtttttagagggagcagctgcactgagccgtgcatattctcccaccccacccccagtggtaagctcagcagcagccagatcaggatcctgcatgagaagtatatactttgcttatgaaatacagctatcttctgtgtgcatatgaccagtctgtaaaggatcatatcccatttcacccaattttttacaaatcattatcattctattgttttttactgttctcacttacactgctacctgttttattctgtgcaaaccctacaacacatttgctttcttgcttcttttccttactgcctcccagaaccctttgggaggcttcacacttcttgtatctcagaccacctgctctcccaacctctacaaacaaagataggatacatttgaatacagtcacagactaggagaaatgttttgtaatattcagggataatctccctaacatgggttaagagactgtatgaacatagatgggagatacaaggagtagataaagaggcctctctcaactacacggtatgactacagctaaaggtaatgtgttcactttcccgcctcctgcaccaagcactgtgaagtacctggcagaagtgctacgtagaagttttgttgattttttttcaatttcagtaaagtaaatagaacatagaagagtgatcacccagtattctctagggtacacacatcatcatgataagaaaattactgcaaaagtgatttttggctgagtttgcctttaagttaagatagtagagtagacgagaactggctttgggcccaatgctaatgttaaatattagccctgccacttaccagtggtgtgaccttggaccagttaaacatttccaaccctcattttctttatctttgaatcagagagaatgatgggacattcctcctgtcattgtaaggactaaattagttaattcctgctgtaatgcctagcacataataagcactatataaatgtttgctattggccgggcccgctggctcacgcctgtaataccagcactttgggaagccaaggcaggtggatcacttgaggtcaggagttcaagaccagcctggccaacatggcgaaaccctacctctactaaaaatacaaaaattagccaggcatggtggcacatgcctgtagtcccagctactcaggagactaaggcacaagaatcccttgaacctgggaggcagaggttgcagtgagctgagatcgtgccactgcactccagcctgggtgacagagtgagactctgtctcaaaaaacaacaacaaaaagagtttgctattattatttgactgattctgctactctatttgggagactgtattattaatttttatgctatatttaagagttctaataattaagaccctctcttttaactagattgaatatgtatgaagttaaatttacctacttcatcactgttctttgatctaatcagccttgtcatcaacacacactcactgaatgcctactatacatatacccctaagccacctcttaatgctactacatatggtgtctaaaattcctccttgcctcattatatgtttgcagaaggatcaacatgtatggaacttcatgtctcctgactttcaagaataagatcttaacttgcatgttcttggctagatactttgtgtaacaacccccccactcaatgattgctttctttctttacttcctctaactgacctagaattctttacacaatgctggctgctgaaaagttgcatgaaaaatatataatgccataagaattctcttcttacaatagctccgttattgtttcagcatggtaacagcatcgtttgtctttccaatcataggcaacaccattacttgtgaggcccattattttctcaagaattataccagcctgcttctaagtatccatcacctcattcttgtgccctttatgtttagtggcacaatgcaaaggttttatattagaagagatcttcagtcacaagctgctcataagaaacacctggtgtaaatgttaaccaacattaatcttttctgtatacctaaggtgttacctgcatcagtgagtgcagctaacgattgcttcttaaaatttttctccacttttcaaagctttcattccctttgaaaaatattaatctttgtataatggtgctgtttgattttggctaatcatcttccttctgtgtcttatcttataaggtaacatgttaagaacttggtctctataatattttctctcctcctagcttttgagttctggatgaaatgtgcaatctcttttctgagatagttgaacctatttgacttgaattacttaatctaaaataatgctaatctttgtgtttttttatggccctcaccccaaaatgtaatccctgaaaaacctggaaaagtcttctttcctttcttcctagaagctttagggacagccaaatgtatttgcttctttcctatccactccaagcccagcatagtgcttactgaattatttccaggtcaactgaaaactatcaatatttaaatttcttaagcctgagattttatagcacacatcttttttctggcccaaaagtccatgtgcatcccattttcttacaactaattcaaaaaagtaaagcaatagaaaaacattttttcccaatttactaagttaataacatgtgggaacacacagttctatagtacattgatcaaaatcctgtgagaagtgccaaaaataaactgaagagttataccctcttctctgggagggtcttatgggtataattcctttcaataaagaatatgctgagggctgaccttctggtaaaatgttacatgctcccacttaggacctctttttggattcatgcaggatttaacctagaaatatcttaggaacctgatgataagttaatgcccgtgtatttctctattaatcagaatatttgactaaatagacaagtcctttttcttcactatatgatttcaagagttcttagatatgttatttaaatattcattgttttggtaaatgtgtatatatttgtctttgatttgtttataatacagggacctcctggaatacaaggaatacaccaaactcttggtggatattataacaaggataacaaggtatggcttcttttttcccataatttataatacatagaaattttatatgattgtatttttgaaaaaaaacttattaattcctaacttctcagacttttatacatgatcacatgtatttaaacatctttccatactgaaagctatgttttcaaaaacaaaaataaaaaaagtattctgttcagtatcttacaaatctagggttttatcctaataagttttttaaaaattttgttcaaagattgttaatgcaaaacattgtgttccaccatcaataatatcatagatctagcctctctgagggcagaaagaaattatttgatactttgaagctctgggtagcacaacaggtgatagacttcttatcaaaaccaataggtgttgcgccaaaatctcaagcaaatatttgcatactacagttcaagaatgagagtccccacctttcatggggaattacattcaatttccccacggtttttttaaatcacatttgggataggcggaatgctgacgtggaagtatccaaatggcaaaagcaagggagttttgttccagattctacaaggagcataatagagtggcagccaagagaagatctaggtgagatcattgattgattcatcattcaatgacaaatatttggggtctgatcactttgtgtgaggcattctgtccactgattaggataccttgtatacataatggttcatcattgatttcttgcaccacagaaagaattggagacacttccctttatgtctttcttttccatgttcttactttcccttcctgtaattttttctgacagctgttactcctctttgtttagaaatcccaaagagaagtgtcaaaaaaatttgttaaatgactagctaattataaaatcccagtttctctctcttcagaacaaggtcaacataaagacttagataatttatggttgacaaatttaaaatcaaatatggaaagttttttatactttataaatttgatagtgatgctattttaaattatctcctttatttaggttttccagggagtattatattaggaagaatgtttgggatatatttcatgtttccttattaaacacttctttaatttctcaacctactcatctgacaaagggctaatatccagaatctacaatgaactcaaacaaatttataagaaaaaaacaaacaaccccatcaaaaagtgggtgaaggacatgaacagacacttctcaaaagaagacatttatgcagccaaaaaacatatgaaaaaatgctcaccatcactggccatcagagaaatgcaaatcaaaaccacagtgagataccatctcacaccagttagaatggcaatcattaaaaagtcaggaaacaacaggtgctagagaggatgtggagaaataggaacacttttacattgttggtgggactgtaaactagttcaaccattgtggaagtcagtgtggcgattcctcagggatctagaactagaaataccatttgatccagccatcccattactgggtatatacccaatggactataaatcatgctgctataaagacacatgcacacgtatgtttattgtggcattattcacaatagcaaagacttggaaccaacccaaatgtccaacaatgatagactggattaagaaaatgtggcacatatacaccatggaatactatgcagccataaaaaatgatgacttcatgtccttgttagggacatggatgaaattggaaatcatcattctcagtaaactatcgcaagaacaaaaaaccaaacaccacatattctcactcataggtgggaattgaacaatgagaacaacacatggacacaggaaggggaatatcacactctggggactgttgtggggtcgggggaggggggagggatagcattgggagatacacctaatgctagatgacgagttagtgggtgcagcacaccagcatggcacgtgtatacatatgtaactaacctgcaattgtgcacatgtaccctaaaacttaaagcataataataataaatttaaaaaaaaaactaaaaaaaaaagtggtttatatacacagtggaatattatttagccataaaaagaatgaaatcctgtcatttgcagcaacatggatggaactggagatcattaaaaaataaaataaaataaataaggaaaaaaaactgtactggctttttcaaaatattaaggcttagcacaagtgaaaaaaagaatgctgaagcatgtttaaatttaatcaatttaatgacacctgtaatgacacctgctgttataaaataggatttatcataaatgcttcaaaataatgagaataagttggctctgatgtcacagtgtcagctacaaaaacttaaagaacacactatattactatcgcccttggtataaaatatacctagttgctacttagctacttaaatatttgctatcccttgcaaaacttttaaagctcacatctttacaggtctcccaaccctacttctctatacagtttatcttgctgatgagtcagttttcccttaaatgaagatatatggagcatttatattttagagtctaaagttgagaatgtaaatttttaaactttaaggttatatttcaaaaaaaaaaaaaaaatgggcactgaccagagcagctgagtggaaaatcttgctagtaacaaaccagtactttgaacttaattattaactcacctaaaagaaccccagttattcttcttgccattacagaatagaggctcacaggtatttagtccacgtgttctctaaatgtgactttaaagctggaatatgactggataaacagaaaggagtatagctgttatcccaaatgatgcactataaccatttagcattagaggctttagatccatctgtgaattaagagacaataacttaccaaacactttattctgtttcctttgggagtagttagagcccttacaccaaggccccaccaagaaggatggaggtggtgggacccactttcccagcacccacactgccccatgcttctgtattgtaaccacctcctcctcaccctcagcttcataagggaaaagccaaatgtgctatgatgagcacgatgcatgttttccattggcattgtctccaccacctacccctgtctgtttttggacactgagattgtttcattttgcaatttgtagtgtgccagatggtctgactgtagcaaataagcacagagaagtggggcctgagtgaaaccttcctagagattaaataatggaccatgtattgagacatagcaagtgacactccaaggttaaaataatcttcccttttaaattggcattgatttatgtgatgtctgcactggagccctagacctcagctcttcaactcacagtggcttcaacagtcacacagcccagattctgctgaagcaactacccatgggagaatgagtaacagactactcataaactgcccctcctcattccgagctcagagagcccatggttcattttccggtcccaggatcctcacttgccctctggcccccatataggaactgatcttttcctctgctattttccttatgtcatctggagggagaagctcaggtatgagaaaccctctctcctcacagcacaaatccaaaaagggatggagaaggaaaaaaaaagcaaatgaggaagaaaaaaaaagcaaatgaggaatagagagacagcctaaggagtgaggtcaggaagatggatatgagtgtgtttatgtggatttttgcatgcctacttatggatgcaaagaataaaaggtagatttctctctctatcacaaaaataatgtgcaaaacagctgctcccattctgcaagattgttcgcaaagaagcaacaatgctgagcatattcttcccctcaaggaaaatctgctcatgttccagtaaactgcacttcattgtttccagctctgggggttttaataaaaatttgataggctctgtcaactactgaagccatcagacccacagttccttactacactttaaatggagaaaaaaaaatacgttttatctgcggaggccaagtgctggtggattttatatttgatgttgtttttaaagctccatattgaaaatgcagagttgtgttatcttacatcaccacactcggtctcagctgttggagatttatgctgtgcctcccagcaaccaattcttgtattcatttctccaaattattgatccaaaaaaaaaaaaaccaatttgctagcaaaataatctatttttcttttcacatattaaatcataacttcactttaatatccacagactagaaaggacagaaagcctttatccaaaatccaatagacaaggcctttccaagcagtgagttaaacccaacgatggcatataaagtgtaggctcccttggagacactgcaggcaaccttcctgggcccagaagattgagaaataaagtttaggttctaacttcattgctctccttctctgtgccccaggctccactggctttgaggaacgttgtggacttaggcacagacatatggactttcagatgttggtttgattacagacagccccccaactcacctgagtcttcccttcctttcatgaccctccacacttgcggctggtgaaatggttttttgcagataactaagaggttcggctttgagccagccttaggccttattttcaagtgagcacagctttcctagcccacatattatgttttaacttgctagggctgccacaacaaaatatcacaaactgagtggcctaaacaacacaaatatatcatctcacagttctgggggccagaagtcaagatgaaggcgttgtcaggaccacgttatctccaaaggcactagggaggaatatcttccaggtctctctcctagcctctggtggttccttggccatcttcacttcaaactatagcaatagtgatctgaatgggtacctctgtatattttgttgtctaaatatttctgtaccttttaagttttctatcagcacatgtatttttaatcagaaaaataaacttaatggaaaaaccacatgattagagattactggctcatttgcccaacagatatttattgaatgccaggggaggctttcatgaatggcatttcataatagttgagacttgattaatgactagtttctggccagacaaaaaggtgagggcaaagagtggtgatctggaggctgagatgggaatgaccttggtcagtttagggagctgaaaaaagaccatgacagctgaaacttctgaggaagaagagtgaccaacatgatgctggagagggaaatgagttcaggtcatgcagagatttgaaggtgatattaaagttttgagaaatggaggccagaatgtcttttgaaggtatttctctgatcttatgtagagaatatgtgtgtcaggaaagcaagagtggattgtaaaaggccagttagagactcactgcaatcctggcaagacatgatggtgggctgcctgggtataggcaggttgactctgtctcttaagagaagagaaaacatttggggagacagagtcaaccaaactggatgactgatcatatacaaggaataaggatgagggtgattatattagtctgttttcatgctgctgataaagacataccctagactgggcaatttacaaaaggaaaacgtttcatggactcacaattccatgtagctggggaggcctcataatcatggtggaaggtgaaaggcacgtctaacatggtggcagacatcagaagagtttgtgcagggaaacttccctttataaaagcatcagatctcatgagacttattcactatcatgagaatagcatgactcacacccatgattcaattacttcccactgggtccctcccacaacatgtgggaattgtgggagctacaattctagatgagatttgggtggggacacagccgaatcaagtggtattgagaatgacactcagagaggaagagttcaggttttctttctttccttaattgttttcaattgtagaatggaattcctgctcaatttaacaagaaaaactccagagatacattagaaaaaactgattctttttctcccatttctgtactaaacaatgttagcagcgtgatgtaactctattttgttctctcatatgtgtatttgttgcattttttgtttcagttttaaacttgttgactatgaattgcttctagaatttacaagtacatacatcaagtagaaaattagatatatgggtctaaaattcctaagggaagtatatgcggggaatataaattagatatatgggtctaaaactcagaagggaagtatatgctgggtttataaatttggctgtgtaaatattacctaagccacaaaggtaaataagagtgctggggagaaagtgttgagtcacaaagaagaaaatcctgaggaaatccaacctctaacagatgagggaagacgaagtcacagagataggaagaaaccaggagagtaagctatcatacaagccaagagagtgacaagtgtagcaagaaggtcgattactgaagagtccattagagtaagcagcaaagatattattattaacattagagggccacatcagtggactgatcggggccagtgtcaaatacatatgtgtttaggagtaaacaggagttacataagtggtgtcaaataaaaaattgcacctgacaaagttaaacaggcaaggaagacattattcaaggctattgcaataggagagagaaggtagacttagtctgagctcaattccactgaaacaaagttcaggagagtttttaagtattgatgtaagaaagagaacacacttccttgtgtttgctaattggctttacccaaaggaagagtaaactttctcatatctttgtgacaggaagaaggtttacaacttggcacaaggctgaagttaggctcctaccctcccacagagcctggaagatagtggcactatcttctccatgattacattttaaagggatggctcccagatccttgagaaagacgttcccagattgtaaaactaacaggaggcttttagaaagatttacatctcaaagggatagtgaaagaacttacaaatacagattttctaaagcgattggtctagaaaaagagagatcagggtatggaattaggaacaagcctgtccaaagttgattccagctgagggaaacattaaggctgtcttggtcagtggacgcaaaaagcactaactacccttttgagaaaattgtccagaaatgggaggaaagagagtaacttaagggaaatgtgtgctggggaactatatgctctttgtgtgttaagtttaaagaaggtagaataggtaggtagtcagagagagaaagagaagtgttaaagaaattggccaattttagctacattttacttaactttaccaaattggccaatttcacctgatagcaataggtaacattaataaggaaaatctcctaagaaggcagaaggcatgggaatcagaggatttatagaggaaacagccatgataagagatgagacagctcattaactacacccagatgtgcatgcacatgggttggtacattcattggcaggaattagaagtggtgactgaagcctggcgcagtcgctcatgcctgcaatcccagctcttacggaggcagaggcaggaggatagcttgagcccaggagttcaagacctgcctgggcaatatactgagacaccattctccacaaaaaggaaaaaaataaaataaaataagtggtgcctgagaacttgcatttttttcagtgtagttacaggcaaggtcacttgcccaaggactgtagagtctaatgtagtggtctgagaacaataaagaagacttgagaatagggagagcagatcagagatgctcagatacatggagaggccagttgaagtggccagatgtggatttggagtagtgagtatttatccccagaggtgtgatgtttctccagaagcaatctccttaagaagtcacaaagaagatgcatggggtgtccaaagctggaattatttagaagaatatttaacaggaatatttaacaacaggcgagagagacaaagatgtctgcacaaatgacctagtatccataaaaagcggttacagaactattatctgactgcttatactgttacagattgaatgtgttaaaaattagcggatttttcttttgtattttaaattgtttttcacccctagggaaatgatgaacatgaagctggaggcctgaaaggagacaaggtaatcagattttttttttttagatggagtcttgctctgttgcccaggctggagtgcagtggcacaatcttggctcactataacctccacctcccaggttcaagtgattctcctgcctcagcctcccaagtagctgggattacaggcatgtgccacctctcccggctaattattgtatttttagtagagacagagtttcaccatgttggccaggttggtcttggactcctgacctcaggtgatccacctgcctcagcctcccaaagttatgggattacaggcttgagccactgcacccggcagtaatcagattttcaaagtgaatagaagggcccagtattttatacggacttacacattcccacgtagggggcagccccctggcagcagttgggttgcatctctgggagggtgtccagcctgcagtgggcaggggcctccgcctgcctcctgaccaggcagtaggattcgaatctgcttcagggtccagcaaggactgctgagtagcagttggctataagaaagagaacatatcaaggggaaattactgtaataagataaatgaaatcaggacacaagacttgttttgtaattaaatgtgaatccgtgtaggtggcaaaaacaatctgaagacccctttggcaaaatgcctcaagcccaggctcactattttgtgtcttcctaattaccaaaacataagctgccctggcagccatttttggtggggttttatactgtccagtagtggtttaaccaaataattatttcaaaatagttttaaaactaagacactgataaatttccgttgcattccccttgtcatttgcaggtttaattatcatagctgtaaagatgacagattcacttccccattcaataagatgtttcactcctgtttgattctgaaattgtaatgaccttggattccatgtgaatgtgccattgtcagaaaaaaaatgcacattaaatctacaggcagagatgagtagtttgaaaatactctgagggaatgtggcctgtgagtgctactttcattcattcacctgtaaaaattctctagattgagggcaggggattttgacatgaatccaagaaaatatgacttctgtgtcttataaatcagtgcaaccaatccattcaaaaagtcgtacacccatcaccagaagttactgctaaaagatagtctcaccagaaactaggagcttcttacagattgatgattgaaaatgaaattttctgctaaataaataaataaaggcttgacattctgaaaaagacatccaaaaattgattatacagcaatgataagtcatttgtgtgagttagattttattgctagtacattaacattatttcctgtaacctaatagctaacagaaaccatacgccaccataaccaacgcattacattttaagcaatgacttctggacatatgcaggctaaggggaaaaaaaaggaaaagaaagccacaaagcttgtcacataggacagctgagcaaagaagagtgttgtgacttttaaagtatttaaatgatgattcatttcttgaaacaaaacagctgggttctgttttgctgtgttcattaggaaacatatgttacttagacattcttaagacctcactgatgagaaatttgattctgtaaaacaggtgtgtttcaaactctaaggaccttttctattgctcaaaatcttttctaattgcttcagaatcttaagtagaattaggaaaagccagtggcataactgttccctcctctcactcaaataaataacacagaaaagtctacagggaacttgatgcagtacatgatataaagagacacataaaaaaacttttaaaaagcgtgattaacaggaaattgccaataaacaatgcataaaataaacaaaaattacaggtggtagctcgcacctgtaatcacagcactttgggaggccaaggcaggaagaacctttgagcccagaatttagaccggcctggacaatatagtgataccccatccctacaaaaattaaaaatattagctgggcatgctggcaaacacctgtggtcccagcttcccagggaggctgaggcaagaggatcacttggagccaggaggtagaggctgcagtcagctataatcacaccactgcaccccaacctgagcaacagagcaagaccttgtctcaaaacaaccaaccaaacacaaacatgagcatagcagttgctggaagggtgaaatcaactctacctatgtaagtctacttagtatctcttctgaatcaatacattagtttttaaaattataatgtaatttaatgtaatgtaagtcaccacagtgaaaatttaaagctccatcaagctgttctcagagatctctgttgcacctgtggcgaaccccagtgcttctgaatcctggctgcacattggaatcacgtggaaagctttgacaaaatacccacactcaggctccatccacagagactccgatttagggtaggggtcttatctctatttagaagtgtttcagatgactctaatacacaaccagggctaagaaccactgagtaataggaagagcatgagctttgggacaaaaagttgattgtggcattaacagctaggtcaccttgggaaggccacttcatttctctaagcatgcatttcctcattcacaccatgggcagaattgtatctacacaaagagttgatagaaggattaaaattaaataagaggaagttactcaaaagcgcaataactaaaacacatataaagccctcactaaagatttgttcttttctattcacccatctcaatctttccttcctctcatgaggtctcatttagcacttttgaggattaattgttgttctcattcttagcacctggtcttgctcatctttgtatctcccaccataattttgacaaagaagggactcagtttgtgctgtagaataaaatatttaaccagaagaataattaaacacataagtgattcaccattcctttataatatgctacttctcaatgcactgaccagcaaaatagaattactaaaagagccaaccctttggaacccgacactacaatgaagcaccaggacaagcacaaatagcactggaatatacacaccagtcacccctggtttagcagccacatcctgtatcaagaacactacgatacagggagaaccacgacttgcagtaaatggccatggagaccatccacatgaccagtctaccagtgtggaaatgaacgatccctgctctgtggcttgactgagactgacaggatgtggtgaagggataatgtacttgcaagttacttgaggagaactgctgctttatagagacagtagaacaaaatatcagaatatcttagccctcctgagaaaatagcaggtgtcttgtgaggaagactgtcagggaaaaggtggagtcactacagcaccaagctaatagcatcgaaagtgtcaaactgaaggagagtctttcctaatgcaaagtaacttcatcacttgtgtttcaactcatctctacagtgataaatcactgaacattcaatttaaataaaaaatacaaacccatatgtgtctaaggttcaggtagaaaatgcttttgcttgcagaattttatgaggaaagaggtctctaagatttccttccagcccaatgtcatccaacgactatgtggaaagatggactgcaaccccttttttgtcctgcccctgtttacctgtagagcagctatgaatatacttacttttatttcaccatgtacattgtcctccccttcccctttgatattggcagatttgatttttacaagcaattgctagactccttctcagctttctacttttattttattaggcaagtctaactagtaggcatatttttccttcacacctatacaatggaaactgtagcacctaccagatgggtaacacgaaggtcactctgtacaccctaatgcctatacaagtctaattgtttattttctctatcaaaccaacaacaatttgttcctaaatgtatcccccaacttctcccttgccttaccttgaatataatttactatgtctaggaaaaaaaatggcttctcttataatgtggtaagaataagactgatgatacacaggatgtttagatactaccatagaaaaaaacaatacttacgtagcttcctctgaattaggaaaaagcctgtatacagcacactaaactttaaatttgatggatattgcttcaaaaggcacattgaatatttaaattaagaacgtgagtgaattcagagaaaaaataagctacatatatataggtggtatgtagacatagcgaatattacacagttgggatgcggatgactgaactttgggaaacactgctgtagaatatttgtactgacaggtctgcaagttggcttcttatccatttggttccttggctctccaacagggccttactattactagctgaaagcctaatggtataaaaaattagtactgaggtgagtcagaaaagcaaacacttctttcctagtatcaactctcacagcacaaaatacttctatgaccaaatacatgaatttttcacacacagcaagcaagcaatcagttttgcaacagacaccagctgattgtcttctaattccattcaattctgacactatttacctggtggtagcaacagatcccacagattgagggctcaatcccacaatgctgccttccacttcatatgccaatcgaaagccccgtgttgttttatctgtgcttttgaccaactggctataaatcggggtccttatgaccccgtccgcggcactaatttgctggaatggctcacagaactcagggagatatttacttacgctcaccagtttattataaaggatgttacaaagtttacagatgaagaactgcataaggcaaggtatgtgggaaggggtgccaaggttccaagcttccatgccctccctggtcatgccaccctccaggaacctctaaacttcagctctacagaagctctctgaacccagtccttgtggtttttatggaagcttcattatgtaggcgtgattgattaaatcatttgtcactggtgaccaagttaaccttcagtctctctcccctccccagaggttggaggtgaggctgaaaagactgtaatcaagccttggtccttctggtgaccagcccaatcccgaagctacctaggggctgccagctaccagtcaactcattagcatacaaaaagacgcttattgctttggggattccaaggattctacgagttgtatgccaggaaactgggaggaagaccaaatatgtattttacaatattgttatcaagcagatgggctcactgcccactgtgcaccgaagccaataactatggcaccagcttttcagaaaagaaagattgtattgcaaaatcagccagcaaagagaccggaattgggcttaaatttgcctcctggatttggggattggggcaagttttaagggatcagagggcaagggacgggatttagggatgttagtttggcagaatctgattggacagcttcaaatttgaccatttatggtaaggtatgttgaggcagatttttgccctggatattccaggctaatggacttccatgcttctgaaagagttcaggttctggtcatgtcccggtcttcttggttccacccagggggtggaattgttggttccagctgttgttacaagtcaaagctttttctgttatgcgtgcctaggctgcatgacttgcagttttgggctctgttataccttaaaggtaacttgacattttgttatcaacagagtaggccctgtttgggctggttccacagttatactatcacatgaggttttaaaattttagtaaaattaagattaaattaaacaaaacgtattccataaatctagaagactaattaatacaaacatgatcttgtctatccattacagaaaatcacaagacatggattaggatatacatataaaaataagccaaagattttagggctgtagtaaatttatacttgaagcactttttggtagctgtttgaggcttcaaaatgaacaattaggcacatccacaggggtcaggattagagatgttcactgcagccttgtttataatagagaaaagctgattacaatcaaagtgcccatcggtggggctgagataaacgctggtttattaacatgttagaatgctactcatctgttataatgaatgaatgagatcatatgtatcaatagagatggatattaaaaacaatgctgagtggaaaaaacaagtcatagtatgttatttatgagataaagctatttatggaatttgtttcaaatattcaataatatattgtttatgattccacatatgcagtaaaagtacaataatataaactgaaaatataaatactaaattcttgagagtggctccctctgggtggaaataggaaatataggggatttcttctttgtaaattttttaatttctttcattttgggtacctggtacatgaaggcttggtgtattctactttattatgttttctgtatttattcttttgaagtaaaaaaataggccaggtaggcaaaaacggtatatgctcagaaatgtaatggtgaacatcattttgcaaaaatgctcttgaagttagggaaaaaaaatcagcattacatatcttctagagactatgtttaatttaagaattgtgtaggtattcagagatcttggtaaacactaaaaggatgcacaatgctgagactcctctgaagtctcattagtgatataactcctttcttaagtattacttctcaaattatattttccaaaaacactctttatatgtcacatacagatctctcttcaaggtttttgaccagaacctcttagacatttctaagctactgctgtcaccacatctacaagaatgccttatttgcccacagccaatcatctaagtagcattataaaccctggaaacagctgagagactcgttttgcttcatataactgctgactctgcccacctaaacaaagaaaaaagtgcctgaaataaaatgagtctggattattgtgccagttaaacagtctgatgtctttgagatcacacacaaaaaaaattggttttggcacaccagaacaaaattataatttttctcctctagatagatattctttcctggaaaaataattaactttgtttcacattacatttaagtatcataatgaaatatatggatttctaaaagacataaagccattgtgaagtactgacaaacacattatcataaaaatagcctaagtagattcagaactttgcattgtctgttggatgctaatagataaattgtatagttagcaggagagcaagcaatcattctgtatctgacagtcacaataatgcttctctaaccatctgcaaaatctctcttctgctttgtcttgaaagggtgaaactggactaccaggatttccagggtctgttggccctaaaggacaaaaaggagaacctgtaagtattttagctttgaggacagaggaagaatatctaaaaaacgggattaaaaatacgtttccaaatcagccccaattccacgtgccttggttgatcctgtcatgggaaacaacagatcagatcttcaagcaagtactagctacgctatgcactaagtctcttacatgtatttacacacttaatccataaaaagtttccataaggtcatctattatcacctgcatacttcaaatgatgaaagtaaggcataaagaggttaaaaaactttgcccaaagtcacacagtactaagcattggagctgtgaatcacacctaggtgagttgattctagaacctaaagtttaaaatcacaaagctcctctggtataactaaacactgcagctaaaataataaaatcaatgtatcaaaagactagtacaaatttatccaaaagaaattggaaacacatctttctgctcaaacaactgttctcagtgtaccttctgaagttatttttctttcttgatttttgtatgatcaaagtggcttcccaaccactttttggtattactgtggccagtttctttcaaaatgtagttctttttgtggggaaaaagagaaaaaccctacagtatcatttatattcaaataggaccacctaaagtgattagagaaatcataggtacaaaaaatgacttgttttaatgcttcttttaaaaaagcagttttcaagaatcagtgagaatcaggcttaacaaatgtttcatctttgtttaaagaaaagtaatacatcttattaaaccactctacccctttctttacgagactgaataaaggatattggtttatcaggggataaaacatgaagaggtcactaaattgcctgcatgacaaacaggaacattatttaaagtattcagtgttacaaagccaaattttccctatgcttcagctttaaaaaattaacaatgacagtaatttttgcagctttagaatcagtctgtggcctatgtaccccagttcttctaccttcaggagtcgtgcttgcccttagtattcagttcaagccttcttacacaactacaggatttggcagtctttaatgaggttctccaactgagtatttgcaataatgtctggaaaatctcatgtctcagaaatccagcctggtgcatgcccctggtacctgccaactctctaggtgctccacacttggaggttcctcttaccatctcttagctgcttctctaggtctccactgtcttccctccaaacctgaacactgacaccaaccttctcttaatttccacatgatgcatggaggaccctgcagtaagattaataaaaattttactggaaaatcgaggatttttagagcagaaaggagaaactttcagtgagttagagcggtgcttctcaaatgtgaacatgcacttgaatcccactgattctaagtcagtaggtttggaagcaggaccagagagtctgtgtttctcataagctctcagtaatgctggtgttattggtccatggaccacactttaagcagcaagggttgaaggagttcatagttcctaggagtcataggccttttcctcctgcagggatttcctctggctttctttctggctaactttcaagggcagtccatgtatctcatgaggactgcctttagccctgttttccttaaatagagcttcttttcctcctaactcttctccataccaggtccctattcatcccttaattatcccaccaccccatacatctttacttgccaccttcctctacccctacattaaaacaacgcaaattttacattattacggagagcagtttagctttttatggtctcaaactttctcttccagaacaggatgtagactttactttgcataataatcagaaggcccaaacagaagagtagtattcattcaaaggtaaattctgaaccactgatcccgaatggtaactaaaatggcaaattttcccccaccataggacattcagaatatggtttgatgtgtaacacatcagagctaaaatatacttaagatcacctagttgaaccccatgattttatagataaagaaaggggagctctaaaagattaagtgacttgcctcaaatagtagccattggagccaggactaaatatcaagtatctagacaactaggctcccgggtttttctctttttttttttttcttttataaccagttactttagtcaatgtggccactaaactttacagtggctgtaaataagcaatgacatgagcagtgtcatataagcaaaaacaagcagggaaataagaatataaataaagccttgatctaatatatagaaatcaaccactattaagatagttcatcatgttgggtagatatgggtatatagttgtcccttggtatctgtgggggatgggttccaggactctcagaggataccaaaatctgaggatgctcaagtccctaatataaaatggcctatttttatttgcatatcacctatgcattctcctgtatacttcaaatcatttccagattacttataatatatattacaatgtaagtgctatgtaaatagttgttatactgtattatttttaaaatttgtataatttttattgctgtattattttttattgtttttctttttcaaatattttttatccacaattgcttgaatccatggacacagaacttacagatatggttaacctcttcaagtcattttcattaaagtaaaaataaaaactaggaaactatttttaaaataatgagtttgtatatttaagcacacaattaaccaactggaagaattcaagtgaatgtctttcccttcaacgtttttatcaatttcttgctgtcattcccatttcacattcaattggatgtgtgtgtgtgatcgttttctatgtggactaggcaataggaagctttggccttgggcagcattccaatttgtcagccacttgggattttataaatgatgttagaatgattaactcattgttcatttgggaatataaaggagtttttaaattaattatcatatatttcctttaagctgcaaagacagactgtgtgacactctgggtatttttggaggtctgtttgcaatgggaatctgagtttggcctatagggtttatccacaccccggtttggagagtttatttctaagagcgtttaattctattttctaccccttctccttagggagagccttttacaaaaggagaaaaaggagatagagtaagtagatattttatcactaccttgggttttctacttcattgatttgtttctctctgattttctggtatgtttactttggagtctaatagatttgattaaataaggtccatgagcattttactttttcctctgtgatttttaactcttttattttgataaataagaaattttaagccttgttaactgttgtcatgcaaggagacttcaacattggtttgagttttctaatacattgtttaaccagttactaatagtgattggacatgaatgttatacaagacatccatgtaggatatcaaaaatataaaattaaaataaaagatacatttttttccaaaaattctgttaatggcacaaagtggatttatcaaatatattaataagtcacagaaaatttaaaaagcaaacttattatagccagtatcatcctcttttgtataaccttaattttgttgtgatttttttcattaagcacatataactaaccattaagcacatataactaaaagtagaatcaccaacacatattaccttaaattctactctccctcattctttctctgaagttttaattctctgggacatgagattagttggtgtcaaattataactatgtcagctaagtagagaatgcagtgattgctaatgggacatgataattagtgtcaaaaatggcattgggggaaaaattattataatgaagaaatcaagaaagtattatttattagtagtaagtattttgaatcatgttttagaatgaactctccttgattttattgtgtcttccataatttccctttttattgtatgttaattagtagaaattcaattaaagtatcagagatgtccatttccatctgaatttaagcattacccttatagtaattattttatttacagggagaacctggggtaataggatcacagggagtaaaggtaatttcctggcattcttcaatttcctctccaaccttaatgagattatgaaaattaaagaaacattgatctttccttccccccacgtgtttagggtgaacctggagatcccggaccccctggtttaataggaagcccaggactaaaggtatataagaaataactaagatttcttgggaaataatttgggaattgtagccattctgtgtaaaacatggtgctttggtatgccactcattttcttcacaaatgctctccaagactttatcctgtttccatggtgattttccccactggctgcatttattacacgcatagtaactgtcttttggttttcacaataggatttctatactctttttcagagcatattcacaatagcatccctaaaagccttaagagtaaacaatgtgagctaaatctacgaccttgagctatattctaaaaggaacagaattcaagtttcagtttctaaaccaaaattatgcaacgttgagttgcttgagtttcccaagtgggattccacaggagtgtcccaagagagcagcttttggaaaatgcaggagaaattaatgtggtgtactcccagacaatgggtagggcaagttaccaggtatcacctgctggtgagaacacataaattaaaagtatctggaaactatcttggtaatcacaaagcacatttcagtattatacagataaagtgggaaagtgggatggtggaaagttggtcttcctatacatgaagatcacactattctttacaaatactcaggtacaatctatctttttttttcttttttagcaaagctaaagtatataccaccttttattttagggtcagcaaggatctgcaggctccatgggacccagaggaccgccaggagatgttgtatgtataatgtctttgatatttctggaattgaaattgagactaggacatgtttttaaaaacatcaacatgtgttcaagtaactgagttatccctcatttcccaaagacatgggtcatctatgccactaaaactgatcatacctaatgtcaggagctattgggaagactagacccttcatataatcatgtgaggtccttttgagtatcattagcctaataaattggtttttggagctcaagttaatcaaattgtcattttggacatgcttgtcagtgctgtaccagcagtagaggagattggaaatgtcaaaagaaataaagaacaccaaaagagaaagcaaacattttcaatattcacagtttttagttcaagtctccatctaaggaagacatttcgaaagcttctatcattttctagcaaaagccttccaaaaaaagcaagtcttttggctaaaagtatgtctggaggaagatcgacagattgcattataacctagctttagtggacttaaaatactcaatacacctttctattcattatccggatcagctttttgttccttggacaactttctagccttctgacaacttgggagctgcgagctctccatcagttcacacttgagcaaaataagaaaaatccttggccataactccttggagactgatcactatctgactatgattagagttccctccaggcaactcttaggatctctccttttttcatgccctgggaacagccccttaacctcacattctattctccatgctcaccgcttgagcctctcctgtctactagtcggtgcacatattctgcttggtactttgaacacccagtttatagagcaaagcttttgatcactcccctatgccaagtaatgggccactgtagataaacctagtggacagatcttatgaaaagagagataatcctggtggcacaagtggagccacaatgctcaaaaactgagactaagtgatagtggccagagctataaaaagaacaaaatctaaagggaaagagccactgtttctaaaacatagtaaaaacatatttttctagttgccctagagttctttggaatcattatgtgatgctgccaaccaccatccttcctcgatggcaataatatgggtgagacgttcggttcaattcgactttagtttctttcctatggcatccaggtggcttcacttgaaacaacaaaccacgtagaatcactaatatttttccaggtcttaaaggccaaaatcaatccaactccttctattaataggttatatgttaaaattctgttctcttgacagagattcacagatatagggaaatgttattgtaagagatgttctcattactctttcctattaactctgagttttctagggattgccaggagaacatggtatcccaggaaaacaaggcattaaaggagaaaaggtatagtttacattttcctcattttatatgttaagtagataggaggaagagacagaggatcataagggagatgaaaggacagcccagggcttctgggattgtacagattgtgcacattaactacaatgtaaatggcaccccctagagttgtgcatttggcagccctggttctggcacaggaatgccatgtgacaaaatgaactgacagatgaagatatcaggagtctgaaagtcaagctcagttaccaatcctggtataaacctaagaagtctcttaatcttgcaggatctgtttcttgatatctacatggaaacagtgcattaacgttgaaccattattggagaataacttaaagaaaacataaagatcgtctatagaaatttattaatagatatgcccttttgtgcatacacatgcatatgtttcatgatactgctaacataactaactgcaaaatctaaatgcactgaacaggcatgaattaggtactcaataaatattattgagtgagttggtgagtgagtgagtgagtgagtgaatgaatgaagtttgactggctatgatgacaacttaaaacaatggaaaccactacctcctcacttcccaccatgaacctgagcatcaaagtaagaatcttaccttgttttctacagggagatccgggtgggatcataggccctcccgggcttccaggtccaaaaggtgaggctggtcctccagggaaaagcctgccaggggaaccagtaagtattagcccttttgttaatatttttcttgcaagttcattaattactacttgtgggttcctagtttcagatcacaagtatgggaataagtttaggtctgcaaaaaaaggaaaaaagaacttaaaacagaactaccatttgacctagcaatcccactactgggtttcttttcccaaaagaaaataaatagttctacaaaaaagacagatgtattcgtatgttcattgcaactctattcatagtagcaatgagatggattcaacctacatgcccatctacaatagactagataaagaaaatgtgatacatacaaccatggaatactatgcagccataaaaaggacaaaatcatgtcctttgcagcaacatggatatagctagaggccattatcctaagcaaattaatgcagaaacagaaaacgaaatactacatgtcctcacttataagtgggagctaaacattggttgcacaccaacatagtagagatgggagcaaaagacatgggggactactgatgggggagagttgaagggaggcaaggttgaaaaactgtcaggcactatgcttacttccttgggtagtgggatcattcacacaataaacctgagcaacatgcaatttactcatgtaataaacctgtacatatacccctgaacctaaaataaaagtcaggggaaaaaagaaatattcatctattcatcttattgtttcttttttttttttttttgagacagggtcttaatctgtcacccaggctagagtgcagtggtacaattatggatcactgcagcctccacctccgggattcaagtgatcctcccaccccagcctcctgaatagtggtgacaacaggcacacaccaccaagcctggctaatttttatattttttgtatagatggggtttcaccatgttgtccatgctggtcttgaactcctgagctcaagtgatctacccatctcggcctcccaaagtgctgggattacaggcatcttactctataaatcagagataaaacctcttaaaagtttgataagcaaagggctttcttctgaagaaaatatacatgcatacaacattttgcatatgattttggaagattcctaggtcccctgaatcctaggcatgaattctgtagagatctatggatcccagtcaggtacactggttttaaaacataaacgttcctagggcagtattgtaaaacagaaaaactacctgaaatttctcttccagaggttttgcagatatcatcatggtttgtcatttgcagaaaatgtctttgtgacccagactattcccaggacattgaaaactggactgccggaaaatctaaataaccaatgtttttaaaatatgttttatatgcctttgtttttcatctcctttgaactttttatgtattaaataataataatatttctcaatatcaggtgcctcattttataaataaaaatattttatattttaaagcaactatacaaaatctataacatattgaaatttttactccccgttccttattcttttatagaaaaagatttattcaagcaagatgaagagtgatgaaacatattttagttataacttctaatgtgtttataacttttctagaagaagatatgtattcatactttttttcttttagggattagatggaaatcctggagcacctggtccacgtgggccaaaggtatacaaatattatagttaatttttaaggaatgaataattaacaaaatacagcagaaaaatgtatgtctcttgagccttgcagtaacagaagcctttcatttcacagggtgaaagaggacttccaggtgttcacggttccccaggggacataggcccacaagggataggaattcctggcagaacagtaagtgaaattcattcgagtccttgttgattccaacattgtgaaacaaaatccagtgtcaaattttaacaaggagaaaagaatagaaaggtcagagacggaaatacaaataaacactatccagagatgactgatcagcattgaggttgtatcacttaagcacagagacagtacccactgtttgtttattaacttacagatgctggtcacacatacactaagtttggattagaagcagtcatttaacccttatacctctattctatatattaaaaagcacaaatacatgtttgtaagatagtaagaatgcctaatattaggtcaatatatattacagcttgtttttaattaagttaaaacaagaaattaatatttaaactggatggagtatgcataagtgaaatgacaccaaaaaggtctgagtaacgtcttcagagtgaagagatgatgttttcaatggtaaaaataaataatgagaagtttttaaagtatttaaactataaggacagagcctagaacagcccctattaataatgaccactatatccacacttgtagatcaaataatagtaaatgtacaatttttatttactatggaaagacataaaacgtttttgaacaagaaaagtggaaataaatggttattctaatgacattaatttagaaaattggtctgtgtggtgtaatacaaaaacaaactaattgttttcatattatgctcttaacattcaacataaatacaattctgacaccagctgtgtggggttttttttcccctactcatcaattccccaatggacatcaactgaatgttctattagtcaattcatgtctgacactatctacctggattaagagtcagatcccacaggttaagggctcagtcccacaaaactgacccctacttcagaggccaactgcatatctggaccttcatgacttctgtccaaccagctataaactgggagcttccatgacccccacctcaggttctatagtttgctagagtggtccacagaatcaagtaacgctttcttacgtttactggtttatgatatcagtaaaggatatgataaacgatacagttgaacagtcagaagagatacaaagggagaggtctggaagggtccctgagtgtaggagcttcagtccccacggagttggggtgtgtcactctcctggcacatgggtgttttcgccagcctggaagctctctaaactccatattttgggattttatagaggcttcatcatgtcagcaagattgataattaactatatttccagcccctctcccctcttcagagaacgcggggtgggctgaaaggcaagcttctaactgtggcttggtctttctggtgatcagctcctatccaggagcccaccgagagtcacctcattggaacaaaaggctctcctatcacccaagaaacccaagggattaggagctctgtgtcaggaaccagggtcaaaaaacaagtattagaacaggactttatgttagcaacctattgttaaggaatttacgagggttttaggagctctgtgccaggaactgggggcagagaacacatattattttatcacaatatcacatccttatattgaagttatcatgaaaagttaaaagaaagcataagcagtgaagggttatgttgtgaatgagggttgtctgatttgccagggcaagaatgtaaaagaacattggagatggaaattaagccaagtaaaaacttgtatcagaaaattattagaggctgggcctggtggctcacacctgtaatcccagcactttgggaggccaaggcaggtggatcacttgaggtcaggagtttgagaccagtctggccaacacagtgaaaccccatctctgctaaacatacaaaaattagccaaacgtggtggtgggtgcctgtaatcccagctactcaagagactgaagcaggagaatcgcttgaacccgggaggcggaggttgcagtgagctgagattgcaccactgcacttcagcctgggtgacagagtgagactccatctaaaaaaaaaaaagaaaagaaaattattagggaagtgatggtggtcgaggaaaaaatcactcagggacacaggataaataggaagggaggaaaaagtagctttggcaagagcagtgatatgaatatttatttatttaaataagaaaagaaaaatcagtgagcagttactgaagtcaactgctaagaaaccagctcttgacttacttaggtgaacattcctcatgcagaagttcatggttacctaagagcggtacaactaccatcgttaagttccctgataatctcccagcctcattttatttatccgaaattctaattttctaaaagtagaaaaaaaaatcattgattagtgttttacctcctactcctgtcactgaacactgtttctggtgatttattccaagagataaatgactcaaagttgaaagcagaaaagaatccctgagccagttacccctgtgggtggtcagtttctgacaggtggaatttggatgcattctttgtgccctcatgaatgtgcagtgacagattatggtaatgatatagatgtcccaagtccctgagcaaaatcatgttgatgtttccagcaacaggtatctgattaagtattcacctacgacctgaaagtcttggccgactttgcagttttccacgtgtgtacggtggcaaaccctgttgttcctctaagtaaactacaatgcttagtcttttatgtcacttggataatttatggacattcttggtggaattttaataataaaatctcatttgtactcagggcgcccaaggaccagctggagagccaggtattcaggtaagctatttaactaattttttagcacagcaaagccagcttgcttacttgggggaaatgactgaaagaccatcctcataagtaactgtttttatttccctccttttccagggtcctcgaggtctccctgggttgccaggaactccagggactccagggaatgatgtaaggactttctttatctaccctcccccattttaatctgcacctgtgccacgtgcaaagattgaacatggatacctctgttttcagggagttccagggagagatggaaagccaggcctgccaggccccccaggtgacccggtatgtagacaaaccttgtctgatttatgtatcttaaatgcacccagaagccaaacagcctaccaagcaagttttgctgtccaaactaattagaatgctcggtgactgcttggtgattttgtttatccccattattttgtcgagtgaaaaaaaattcaggctggatcagcatttctgtgtgtgtgatgaatacttatttcctaagggcataattcaactgtacaattttgccccaggctgagccttggcatataatgtctcaatcccattgaaaattgagataaaatatattgccacgatttctattttttctaatgctagtggctaaatgaatttcatttttctaaatgaaattttgcaggtaagttgcctacaatatggtatagatccattgattctgtagctttaaaatgttgcgatgattaaattatgaaaactggcttgagtaggctcttagaaaaagggttaggcacaaatgtgtgtttcaaagttttattttaggttaaaccttgctttgagcaacagtgaaacccctttaaatagcctcagactcggcagttataatttgagaggccatatggtacatgacattgtattaagagtcttgtataataaaatccaaatctggcttctcagttctaagcctcacaaatcctttctacctcccacagtgtttgggccttatgtgcctttataagctatgtgtggaggcatattttggcattactttaacgccactgttgagtgaatcacttgtgcatttttctgggaatcttgcaaaaatgttgcttgggtttacacagtgtctctctgaaagaacatctcaagacgtgtggccaaaaggtagcccaagttccttcagtgtttgtcttgcctatcacttaagccaactgtaggttctttgaacttccatgagaaataactttaaggcaaacttatctggtacttttcatatttctcaacagcctgatagtgtgttcgccagaggaatgatttccttttaataaataatttatctttatgtattatttaaaaccaatgatataccagggacagcataaaggttgccatgaaaatataaaatagggatgcacagtcaaaactatgatatgtgtgtttgcacattcaagagagaagaatagtgaacatttttcaaaatttgttctgaattctatcagtgccatgtgcacatttctttatacgaaacataatgttaagccagtgattctaaagtgagacaccagaagcttcatggcattttgaggaaaaatgtctacattatactgtatgtttatattgtattgtgttcatatataaatgcatgtatttggttttatcttcttaaccacagattgcacttcctctcttgggagacatcggtgctttgctcaaggtactctattgctatgtaagaaattatgtgttaatttccaggaaaaattagaaagaaaaatatttagcagaaattgagtcaattgcttagctggaactaaaattcaatttttaaatggcaggacatctttaagataggaaaataaacatgtatcttatatatcttgtgccatttatcctaattctttcactctcttcttctttaccagcctctcattttgggtggggcaggggtggagggcagctggtaggatagttatgaattggctacagggaaggaattatgtcattagcactctggagtagattattctctcctctggaggaacatctttctcttaatgggtgttgactcaccctggctcactactgtgaaacctaatctttctcgctatatctggcctggtcagtcccaagatgaaaatcagtgctgctctataaatagccacttacaaggctgaattttgatgtcataggattttacaaaattccacagttgacaagtgccctaatacctgttactctgttcaataaaaatcacctctacctattatcgtctcagggaattaatcttgctacctctttttttttttatctctaacacttccctgtattttatcagtaaaacaggtagggggggatgataatggcacatatgtaagggtatgtatttgcatgtttctgcctgatatgctaagattgagtgaggccacatgaaaatcaggcccttgacttcatactcaaacacagtgtgttgtatctgtctttgtatgaatggacgttgtgtatgtgtacacacacacacgcacacacacacagactacagttatatatatataatttagtttgtatttctagcatttagcccagtgatttacacaattatttgcacaatagtaagcaggcagaaatatttgtttaattgaattcaaaagactcgagttccggcatatacatttgtaaggtagagttttgagaatagatatataaacataagtgtaaatatgaatataaatataaaaatatattaaaggagtttctaagacctccaaaaccagcagtttttataagccagagaagaatatttgtggggatttcaggaaaatcttatatttattgagttaaaattacatgccactcaatatgccactttacttatatcatcttatttaatttccttaataatcttatgagttcaggctgttgcgcattcccactctatagatgagagaccagaagttctcagcagttaagtaactttttcagtcatagagcaagtaaatgtaacattaacacaggaacataggtcctcagacattaagtcctagattctttacaagacagtggtgctggaaatagcaggattgccggagttatatcatttcagaatacttagggttctttaaggatgagaaacttgtatgctttagtagaaatgaatatactggtagaatatgggatctcacagaacagataaaaggaccatgaataggctctgacgggaagtggaaccagggctctcagaagtggaactaattgacaatctcgcccgggaatcatccctctaatgagtgtgctctgccattgcaccaatccctgcatcatttcactaaggttctgagtccataacgagcaggacatcttgactgatagtctccacaaactgtatacaatagaagaaaggggaggtatgtagttccccgaacaaaatccaaatacaggaatttagactgtgggttggatctgtcatgccaatgtaataacatcatgttaaatcctgatcttgttaccctatatgttaacactatctctctctgccttgagtctttagacaatttgatcatcctgctttctgttcgcaaaaatatctttgattaaagtattaaaaagaactggcataattacaggcaccttcaaaggccttcttctagattaatcagcatatcaatccctctttgaacgactttgtgtattggttaataattgatgcatctttattctttccatgagaaaatcttaagacatttttccaagaatgttaacaaaactcagttatttaaatttgccattctggtaaccctaacccaaagaaaatgaagtcagtttcaaatgactcttaaaaattatgtttatcataatgattatcattttttaatgtttcacttaaacagtctattgaataatctattctaaaatgttgctccatattgatatgccaaggttttgctccatattgagatgccatgtttgtgtctgcagataattatctttttcatactttttgaaatatggaaatcattttgtttttcttaagttctcaagtgtctctttatcttcatagtttttcaggtgtcagtaatagttctataaatatatatatttaactcccctgccaacacattaccacctgtgaaataatccaggtggtaaaattcatctgggaaacattgcatataaccctagttcccttttatatattcagactctaagaaagaccaccatgaagagagctttttcacccagcattttttttatgtactttaagttctggggtacatgtgcagaacgtgcagctttgttacatagttatacacgtgccatggtggtttgctgcacccatcaacccgtcatctacattaggtatttctcctaatgctatccctcccctaccccccccaaccccccacaggccccagtgtgtgatgttcccctccctgtgtccatgtgttctcattgttcagctcccacttatgagtgagaacatacggtgtttggttttctattcttgtcttagtttgctgagaatgatggtttccagcttcatccatgtccctgcaaaggacatgaactcatccttttttatggctgcatagttttccatggtgtatatgtgccacattttctttatccagtctatcattgatgggcttttgggttggttccaagtctttgctgttgtgaacagtgctgcaataaacatacgtgtgcatgtgtctttatagtagaatgatttataatcctttgggtatatacccagtaatgggattgctgtaacccagcatttttgagatgatttgcctcatgtattcatcagggttctctagagggacagaactaatagtatatatgtatatatgaaaggaagcttattaaggagaattgactcatgtgattacaaggtaaagtctgacaataggctgtctgcaagtcgaagagcaaggaagccagtagcagatcagtccaagtctcaaaacctcaaaagtagggaagctgacagcgcagccttcagtctgtggccgaaggcctgagagcccctggcaaaccactagtgtaagtctgagagtccaaagctgaagaatttggagtcttatgtttgagggcaggaagcatccagcacaggagaaagatgaaagccagaagactcagcaagtcaaccccttccaccttctgcctgctttattctagccgagctggcacctgattagatggtgctcacccagattgagggtaggtctgcctctcccagtccaccaactcaaatgttaatctcctttggcaacaccctcacagatgcacctgggaacaatactttgcatccttcaatccaatcaagttgacactcagtattaaccatcacaccttgtaagcttttcagtatcgtgcaaaattagtgttccaaggagcccatgtttgaaaatcagatttacattgctattcattaggtcaaaaatattgaatttgaatagccatgggctttcttgccagcttcttatcaataacaagcttcacttctttttcatgtttaaagattcttccctttagggaaaaggatggaagaatggaaacttaagttgtcctaccttctgtcaactgttaaactatctcccccactcagtggcccttattctgtgcctttcttggtcatattcttattccaacaatttatttaaaaataagcctatatagagcttttcacacacactttctttagctgtgtgatgagagttatgtttatcttatgagctcagacacttgaagtcaagccttcccagatcaactaaaggttgcagagaaggcaatggaaaggtcatttcacttagatttcctattgtcacttggatatgacctaggagtcaagtttatgtcagtcaagtaattatttctctcgagtgcctccactgacaaaatgttagtaaactgtatgtagttggagaactaattttgctcccagaagaacaaatcctttcttcacaattttttctgttgtttttaaaatggtttatgctataggttgtttgaattctgtaatcttgctgggttttctaaactttattaccactcccttttaaaacattctgctaaacaattgagcctcagtttttgttcttgacttatgtgtcttttccttatttatttggaattttctatttaagtgtcattggagacctgttttaaaaataaaagttcatcaatatcataaacagatatcactgatgagctttgtaaacagtttttgcctcacaaaaattaatgtttttaaattggatacatcaagtgtctgaaagcagaatgacctatctatatcactcatctccagaggttccaaaaaaacttcacatcacatgaaacctcacctttatagacggcttttatgactccctcagtaaccttatctttatactcattagaatttctgtggcaactgccaagccagtgtcccagggctgaaaagcaacaaaggagaagaaggaggtgctggtgagcctggaaagtatgattccatggcccggaaggtgagaagcctggctgaatgtttacgatccctgtgggttacatgtagtgcatcctctcagttctgttcttcctctgtcttctagggtgatatagggccacggggtcctccaggaatcccaggaagagagggaccaaaggtaagaaattctctcctccactttcccctgtgggaacctcaatttagtatgaaaaaaagaacccgatttgaaaatagacaacttttaaaatacatactatatatatatatgtatgtatgtatatggagagagagagagagagagaaagtgatgtaaaagtcacttgcaaatgttgccatttatttgttccctgaccctgtccaaattacatgccccaagtgttcttagaagagatttttttcatttccaaaagataagaaaaatgattgcatgtgctagctgaatgtattgtctttttagggaagcaaaggagagcggggctaccctgggatacctggggagaaaggcgatgaggtaacagattcttttctgattatatagtcctaatattgattctctttacgtggctcaacagagtaaaaatgttaatttttctatagctcagatctgatgctataaccaataaaaacaaagaccacttagagcttttaaaatgctgacagattttaaataacatatttatgtttattaccaagggtccggttttagagacaaggaaattaaggcacaaagttaatatgtcagttataatttttctgttttcatttaacagataataattccagctctctcaaaataaaagtaagggaaaggaggaagggaaaatttactcaaaagaattccaaggtagctaagagatttaaaggaatagtagttggacaaccagcctagcagtaagggcagctcaagaacccagcagagcttccctgggtaccactaaactctgattaaacttcagcaaccttggattgtctgtgtctttgctcagctttcaaattcttgggagaaaaaaaaactgtcagaaaaatcttcttgttctagtttacatcagctgctcacccgttggactaaggttccaagtccaatgtgcttttgagataatggtataattttctgactgtaagccatggtgatgctcaggacatcatttttttcttacataattcacattaactcttagaaaaaccaattagaatgatgaattgctgttagtttaaacagttttgatactactaattcttaatgaaagtaagtaagccatctggcatatattaaccttgatgttattgtagaaaatcataactatataaagaaaatctatttttctaggtggagttatattttacattaccagtaatcatcatgtactattgtttctaattaatattgcttgtaatctagaaaactttgaggtttgattttttcccaagttaaaaattgaataccaagtatattcaatatttattttcatccataaataaaacattatcttcaaaataagttattgtgcttttgcttcctcatgttccacagaaggttttactaaagtacaagcacaataactgattttcatagtccaacagctttgaactacctccacccaaaaggtaggctttagaggcaattgagaaggtaataacaaaaagatcaggaaataattggaattcaggttttgtataagtaactctaagttaaagtcactagaagttaattttcattgattctacagggcacttttctctcttggtgaactgaaatccattgctaatattcctccacactttagcgggctttttcttcggtacccctcataaattctgtaacacagttcacaaaattgtacacaattctcattacatggggagttccagcaagttcaggagattcttttccattgtttcttcacactacgtgaataatatgaataaatctgaagtaaactattgactcctttaggccttgtagggggaataaggtggtgcagctttttctttagcagatgggaaataacggatataatcttgtcttctacttggtctcagatattatttgaaattacaatttgttgatttgtcaaagtgaataaaactttgaccaaaaacaagtgcatttccaactggccaatgaactataccatttcaacatacagtatggacttgagatctaatcttatgaaatctcaaatgtctattgtactctaagtggaaaagatacagagggacaccccatctctttgagacttctaattattatgtctttcatctgtttggaaaatgagagagaggagttgcctgcttgtttgttactcttagaaaagcaacattttcttccacatttttcacagacgttgttgcacagctcaaggtagcaacttggaagatgctaatagaacacatgctaacctttgatggagtgatttcttgcttgaaatgcaggtcttcctataatatcttgggataataattgataaattagacatgaaaaatatcatcagccagatattatagcaacagaaaatattcttggtagcaactgagctaggatttgcaaaatgaaatatcagagcagggtaagaacatagctccaatggtctccaaatatctctgcaataaattttaatttgtattttagtttggcactgtatgttaaattgactgtcctactctttaatatgtatttgtcttctttaatgatcatcttgtcttctaaaattatcttattgccctttatgcatccatagtaactttcacttttactacagaatttcagctttttcagagaaaggctgatgggaatgattttttatttatggactgaggtttattttaaagtttaatgtggtcatcaaaggttaatgaatcccaagcttataaattagactatctaaaaactcactcaacatctctggactgattcagtgttgagactaaaagtagcaaaaaaaaaaaaggaatacatatatacgtatattttatgcatgtacatatagaaagaattttatggaaatatgggtattttgaggtaaagaaatttatggtataacatttataatctccagtcatttagaggtgccattatcaatgaaaatttttttactttgcatctataaacctgcatacaagttaatgttaggggaataaaaagaatgagtaccacataccgatatgtagagcctgcacatgcacacatgcccatgtatacacacatacacatacacacacacacacacacagcactgccaatgagattgataaaattttgaagaaaaatatgtcaacattctttaacaccaatacacacaagatttggcccaagacttatgaggaattctagcatgttcaagtagaatttttaagcccttcttcatatcatatcacatgaatagacctgaagtaacacatgatgccatttggcattgaatggacaaacctagaagaacttggtccttgatcccactgatgcaaagaaacttgatccagctcacagtcctatagaatgctgataatcaatatgcagtaatatttccatggccacatcatctaatatttataaagtatatgaaaatgcatatatcataatagtaaaaggtaaaggaattgtatgatgacaaagaatggtatggcaatccagaaagaatattttactcagtaaaggagactaaatcctgaaagaatggaatcattcagtctagaacttgatgtatcacatggttatctgaaataacaaaagcatattttaaaatagttttttctcataatagaagtgatctcagtccactattgaaaattgggaaaatacaaaaatgcactaaaagataaaatttctccctattcccactacccaggagggacttctggcaatagtaatgtcatggtccacaactctattagtccattttcacactgctataaagaactttcctgagactgggtaatttataaaggaaagaggtttaattgacccacagctccacgtggctggggaggcctcaggaaacttacaatcatgacagaaggtgaagaggaggcaagcacctttacgaggcagcaggagagagagcaaaggaggaacttccaaacacttacaaaaccatcagatctcctgagaacttactcactatcatgagaacagcatggggaaaaccacccccatgatccaatcacctccctctctctacatgtggggattacagtttgagatgagatttgggtagagactcagagccaaatcatatcaacaacacctcatctataaattccaaaaccaaagcctctgaaaaccctggaaatgtttcccaagtttggctttgtttcccaagcaaattcatttggcagcccaatctggcctaactcacacggagcttgtctattccactctgtcagaatatcatgttttgccacagaaatatttgtgtgtttattagagggcactgcctcaggcaccactgcagtgtgatataatattcagtatgtatatcatgttacctgtgaaatgaagtgataatccagaattctaaaacacatctaacactaaagtttctgataaaacttatctatttgtcgtgataaaataataaaagcctgtatgtatcattcccatcttttaggaagtacatttaaaattgtttaaaaatttagaccctgtgctatataagatttgtgactttatttttacatgttttctaacttttttaaaacatgattttaataattgcaaaatatttcatgttataaattgtatgtaatttatctaacaatattctgttgttggcaaatgtatcaaagtaacaaaactaattacataagttagctaatcttaccatttcttccttgatatataaatgtatcagcatcttaaatcctatccggtataattagtgctattctacaaatctaaggaggggagggaggggaaatctattcattattatgcttaagccattaaagcgttccaaatttaaattcaccagtgagccaaatttcttcttataataaactgacaagctaaaataaatattatatcataaaacatattccatttttccctagctgaatggagcttaagtgtaatcatctatttcttcaatggcattctgccaatctaaaatttgtatttccatgttttaccagtacgagattcttagatactactgctgacggagtggccctataaaataagaaatgctctatgaatcaccagattaaattatgtttgcttcagattccatgtcatggcattttagctcacccttcttactctttaaaactgagtattcacacatattcttacttataagtgagggctaagctatgagtacgcaaaagcatacagagtgatataatggacgttggaggcccagaagtgaggagtataggcgaggtgtgaaggatgaaaaactacctattgggtacagtgtacactacttgggtgatgggtgcactaaaatcgcagacttcaccattatacaatttatccacataaccgaaaatcacttgcacccctaaagaaaaatttttatttttgaaattaaaaaattagaattaaaaaagtatatttgtatatgacaaacattatgtttctcgattagctaaataagtgtttaatgttcaatggtcaaaatatttgattaactaaaatgccttcttcccaatgatataacagattttatgatgggaactatcttttccagggtcttcaaggaattccaggcattccaggtgctccaggcccgactggaccccctgtaagtatttgttaaaacgattgcactcacagcttatatctgctggtttgatgcaaggtgaattaattttcttcattgccttttgttctctgtgcctctatgtagattgtccagatattgcctggaaaagtagcctcatccaagctctcagattttcatttagtattacttaaggctactcagtgtcctggggacttgcctcagaattccaccagaccagaaagcagtctgcgattaagctagtgtgtttgaaatagaaattgcatataaaagagcattctattttttatttataattttttggcactaacctttagaagagatagtcaaatggcaccacaaactgagaatttattttctaaaggaaaaaaaaagtgtgctaaggattatcagatttcatttatttttgttcctatgtataaattaaaatacctctattttagtcaaggctttcactgcccctcaaacacaccatcaaagccttcgtgtctttcactgtcttgttttcctagaacagaatctcttttgctttatacttgccaaacccaatctctcattcaaacagtttaattctagagtcatcagataaaatatagtgcatgcagttaaatttgaatttcagataaacaaataattgtttaatataagttcatcccaaatattgtgtttttatttgctaaatctggcaacccagcacatgcttcaacttctccacctcatcctttcttagagttcctatgccaatagagtctttaccacaccagtaggaatgtaattatatattttaatgttctgaaataaggattttccataattaaagttgtgtcatttatgcttccgccacagttatacagaacaaacctggctttaaattgttcactaaaattaaaaacgatgaaaaagagttgtgaaagaaaccatgaaaattatagctaactctgttcccaaaggattaaaattaaattttatttttcagtggtaaaatgcagatcatagaactcaatatgcacactgttaattctgccgccttgaagtatttaaaatgttgatccctaccaaaactatagctcatttagaaaggcataatgttatgtaaattgccatttaaacagcaagactagattcttaagtgtatcaaaaggttccaattaaggtcattaaatgtggttgacgaaggtgaaaaagcgaccacaaatacaaattttacccttccaagggcttatcagcaggatacagctgctgtatcagccagaagaaacataagcttctagggcttatttaattaggatcaaatgaccttcaaaatgtgtaagttttagtaaccaacttccaataccctttggccatttaattgttgtttctgtaacaaacttagttttgtgttttacagggcttaatgggaagaactggacatcctggtcccacaggagcaaaaggtgaaaaggtacaaaggaaaagcctcacttaccatccaaactggggcttgaagtgggagcaggatgagactcttcacagagagagccataaaatcaagcaaagcctaaaagtagaaatgatggtagaaagtacctattcttgtagtggatttggaagaacacaggtccaaaggttattctaaacacgggagatattttcctaggagaaaggataaatagaatattggttccataaaacaaaagttcaggctggattcagaatcctgggcaaccatctatgtggaaggattgggtgggggagcctcctggaaggatgcaagtaatgtggtgtctaccagggagttccagccacaggggctgtcagttttctatgacaaaataccatagacggagtggcttataaacaacaaacatttatgcatatttctctcagttctggagtgtgggaagtccaagatcaaggtgctggcagaatcggtgtctgacagagtctgccttcttgttcatagatgtcacctactagctgtgtcctcacatagtagaagggtgaccaagctcccttgggcctcctttataagggcactaatcctattcatgaaggctccaccctcatgacctaatcacctcccaaaggccccacctccaaaagctccagacagcagactggctctcaggaccaagattctggtaaccaaagagcttgcagagacagtcgagaagttctgtccctagacggtcatgggggaaatttactgaagaaccaggatagcttgtttcctggggagatcagttattggacagatgggttgccatggtcagaaaggaggaccagcattagatgagtctcagacaggacaccacacagttttacatgtttaccccatttaagatctaaactggctctattgtactagtccaggcagatccagcaagtaagtggaataagcctagctatttagatcggggaagtaagaatcaagagtccacatgagccactcaagcagcttccacccactcgtcaggacacaagttccctgaccaacgtggaacataatgacatcaaggagcaaaggaatcccaacacattttgaaggaaacaatgactttattctagatagtctctgcacatttttttctgattttatcccaaggagcttgcccaaccccactagccttttttctctgttctctatggaaattattcagtcatagacttgcctttgaagttaatgggaattccacactgagatgagctttggggcacaaatgagagtgaatatatgacttttaattgtgccgggggaaaaaaaagacttttcagtaggcacatatttttccttgtttgttgactcattagaactatgacataattctttgaaggacactgccagttgtcagcagaatgtgacatgtcttagagagatagccacatcaaagcagtttgggaaaagaaacaatatgcttgttctttgttatatattctcaggcagaagcattgcaagaaaaactttacagtttatttttattgataaacatgaacaaaagattttatgatactttcgttacaaaaaatggcagggtattggaatgaagtccttgattacatttatgggaatggactaaaatccctcaaaattcttggacattgtgagtagaaattttactctatctgaattcttttttaattaaccatgtcttgccatttcccctgctatagagggacttaagagattttatgaggctattattctgagagaaaagcagagttataggaagaactgctgagagacaccagagggacttcaatagctctgcttattatggaccgataaacatctatggtttataaaaatagaagtgaaatacatttttcaactttcaacttgaattcattttcacaaattctattttcagtctgcttctcctgtaagtctaagactgtttaaattgtagtgactatttgctttaaacagtactataccacagttgcttctgctcaggaagatgtgtctgacttgggtgtaaagtcagatattaacgtaggaaatggaagatgaagtttccctcctgcagacacaacacaggttgtgatttttttactttcgtcaaattatgtggatgtcccctctggttcccaaaagatgaaggtggtagaaatgaggctcaaagtgaaggctgactcagagccacaatcccagagcccactgcctgcttgtaggagagttccacattgggagagttcctccagctgcactggaagtccaggacatgagcacctgggttgtctggctccatctaaaaataagcttcgtttctagagctcacacagtgagagtcagaatgggtatgggaaaagacctttacctgtcctgcggtctagaaatgtatttcctgggtaaaggagagcccagctgaataagactacaaggctgaaacaacatggcaagtcatatcgatttcagaagatggctctgtgattaatttcagaagatagtttgtaaacctggggtagaaacgtctacgccgctgatatgtctatatatcccttgcagggcagcgacggaccccctgggaaacccggaccacctggaccacctgtgagttgttctaggcttaaaatttaaaattcatgtgtttacttaagacttttataactcagaggtaagactacatttagatgttttcaaagataaaagtcttctgaatttcgtgtataaatataaatgatagccaatgtagctttaaagagacctgatttgttctccttttggttcagcctcaatgtgcaatgctcagattggcatactgcgggtctccccatcttggatttaggaatctgggtttgtgctccgactctccacttcctggctcggggcccctgggaaagtcatttaaccttaatgtgcttcattcacagaaaggagaagggccagaaaaatagatcctttccgctgatgcgagttggtagaaaatctgatattatgctatatgtgttcattcccattcatgatgtctgagatgcaaggaaactctatttatgtagctcttagtgaacaaaaagtacaagaggcatcgatgttttcattattgtgattgagacagatgcacgctccgtcagggaaacggtggagaggagaggagcctctctccgtggcaagtctgccctcatgtggggccacgctcgaatcgcagccgagccgagctgagatatcacgcaaaacacccttttctaccccacctcacaggaatactttaagaaaccaaactcaccatagaaagggcagaattgaccgtgactttccgaagacaatgaggattattatcagtctgcgtgcagttgcatgctttgtacacgtaaatgaagagattagcactctatttcctaaacttgtttcctaaatctgttcatctgtgttactgaccttttcccttgacaagaaagcaggacggaaagtattagggttcaaatcctaaaattcactccttcccccgtgggcagaacagcaaatataacatgagttcatgaaagggacctataattttataatgcacttaagatgtctttgtcttccctctgaattctccaaaaccatccatccttcaaaacacagtttaaatgttttcttccctgggaaacctcctttggaaatctcagatgaaaatatcctttgtctctccaggacgtagcacactaaaatatggcagacattcagtcgctgtcagataaatgagttaaataatagagtaataaatggatggagcgtttgtcttccatcactagtgtttggaagatgcatgcaaattgtcttcacagaacactactggccaccatcatacagaaacaatgaaacagtgacttcttcaactctgcaactgatatgtgaaaactgcagaaaggaaaaggcagatttgactattgattctatacaaatgtttaaaaagaaagacaaaagattctaactaaaatttttatatggaaatttttcctaaatgctaaaatgtatgatttttttaaactatagaataagttctcctttaagtgttggttactctaggacatgtcaatttttttcaagatgttcttattctcttttatcctaaagaatttatttttgtagaaacatccacacagggttgtggataatgtcatctccccatttaccttaattttctatttggtatgaaaagactgtggaaaaaaattacttttcagtagccaaattgttccctattcacatcttcatcagcactatggcattatagcctgcaggttagcaggctgtaaacagttagtataaattgacaattcagaaactgaattttaatgagcaaatattttcctccaaatgcattagtgtctcatctgtcaaacctgaacattaattaaaccccaactgaaagtatccgtgtgcttcaggtgtagctcacactcccttttcatttccctgcatttgctttggaaaagctaaaaattaaaatgtattattttacttagagtattaaattccctttgtaaaatagaatagaaaaaagtaaaaaatagaataggaatagtatcatttggtaaaatgataaaatgtagagatgcaaagtattaacttccaagaataattctgtatctcacctctttcctaagggtattccatttaatgaacgaaacggcatgagcagtttatataaaattaaggtatttatatttgtaattatttaaaatccagttatagactgctgtaaattcgtctcatctttctctttttcttttcttttcattttcttttgaagggaggtgtgaatgttcccagttacccagggccacccggtcctcctgtaagtacagttgtttatcatcaaacacactttagctgaacaaccacaatgaaaaacaaacaataaaaacctcttaagttcactgaaaaacgcatgttatgaatacagccaaattttacagcagaaggaaataagtaaaaccaattataataaaattgagaaaatgtatgcagccaaaataatggaaaacagcatttttcatggtggtgtcacttttttcattgcaaatctaagaactaagtcaatgtccaagcaatcatttttatgaaatttccatcaagttatatttattcatcttattcttcaaattcaaactgtaattaaagcaaaacttgctaatattcgtatgtgtattaaggcaaattggacaacagtgtttcttattctgtaactgctttggtcattatttgaaaaatgactttccatgtttctcttacagggcccaaaaggcgatcctggcccagtggtatgaatgttcccatgttttgtgtcatttagaatattggtctttgttaaattttgaaagaaaagcatcgggcaaaatggcctgccttcttaggtgttcatcaattaacatgctggtggtgacaagcaggccacaatataaatgccagcaatatgttctctgtttctgagatgcattagtcctgatgttgtcactgcccttgaggtttgtctctttccgtcagtgtgtttttaaaatcatcctgtgatggaggaagacacatataaactctgataaatggggcactttcttctaatagccctcttctgataattgattcaattttaagtagattgtggaagagaaatacttactggaaagaaatcccttaatatatctgccatctccccaacaaaaaaaaaaggaactgtttatttgctttaaacgtcttaggcaattattttgcaggagatatgttttgtcataaggctgcttattaggaggaatgtatcaggaggttatgctcagcatggaaggagatcatgtcctccagccgcctaaaggacgataattgttctcagcatctttctgaaccatggagcctctgtaaaagttctgccaaattcaattagatgccctttattgctgggcattttctcctgtcatgtctttttcaagcatatccttcatgtttcatttgtatatattttaacctttgggtatatacttgaaactcaaatgtacctaaagctgaaataaattttcaaaccactttccattgccatgtgaaaaaaaatttaaagccttttcattatagtacagtttgttaaaactcaatgaataaattttaaaccagcaaagggacaagtcataacaagtaatgtttttatgtctaaaaacatattttaaagagatgcattaaagagctgtttgattttgttattgggcaatatatattaaaagccaaattgttatcccctgaaagcattgtttcaactagttaggatcatattctgtaattcagtttcctttgttttactattcattcaccctgtctaccctatctttacctgaaaccaactatacgcttcattctaattttaattttcttacatcttgttgataaaaatttcctcctggtctttccctctcatactcatacacacaaaacagcttctctgaatcatttaaaagcacctaggcttctcactgactttttgggaacattctttgaagttcttgcattaataactgcagattaagataagaactttttaagtattataataaaggataaattataatttactggcattgaaaaggggctggcaacaaaaatgtagacctatttgagtagaatttgaagagattagtcttcaaatttcttagctacaacaaaggatgaagaataaaaactgattgaagtgtgttccttgcttttagagatgtgaattgagtgagtgaagcacagaaacagaaaaatgcaatcatgaaatgaaatacacatttagtgtacacattcagcctcatcctggatgaaactttgaagttactcttttgggttctctgtcagcaccaccctgcaactctcatcatctcccaccagctgtcctgtagggaaaaataatagttcctgccatagaaataatccaggaatgatagaattgtagatcacagagcaaaaacttgagaagtctttttgaggttggaaatttactcttccaacattcttcaaatcccatgacaatagacctgcctcactatttctaatcttctccataaacctttctagaggaatattacccttaattgaatttattatcttctgaggcgctccatttcattcctttggtattcagtttataaatgatgtttaattaaatatttaattattgctactttcaaacaaatgttgattgattgagcacctctgtcttaaggactgttgagaatgtaaacaaggagaatcaaagagtgtgtttcctttgtcagcaacctagggcctcttatacagaactttatgcagaacagaatctgaacttttttttttgatcagttgtcaagttacatattaggggacattttaaaagatttctgaaacatagaaagcatatcagttcatatgctcactcactaagtattctgtaataagggcaatgttataaataataatgaagttatatccctggtaatatttttgaagcagattggaattatgtatgcaaaaacacacttacagagaacacaatttgaaagctcttgtttctttgtgattatgtctaaagcatccggtgtcctaagaaaatatttgcagtgaacattaatttattaacaagaaggcatcaaacaactccccactttatctcttttttaacttaaagccctaatgcaagcttgtccaacccatggcccatgggctgcatgcagctcaggaaagctttgaatatggccaacacaaatttgtaaactttcttaaaacattaggagatctttttgtgtgtgattattttagctcatcagctatcgttagtgttagtgtattttattggaagacaattctttttcttccaatgtggcccagggaagccaaaatattgaacaccccttccctaatgctttttttgttcagagttagcaacttccttcaccacagcttttcccaaagtgtttcttgaggatctacaggctccagctagcctgggaccatacactagaaaatgtaaagatttttaaaaatagaaaacactaatctacccccttccagtgactcatcaacttgagcaataacttttagtgttattggagataatgatcctggggtcaacttcttaagcattcacaattcttgtccagctgcagagaatacttaaagatgataaacactgctttgagtgctccatcttcatctactcttaaacagtttattcttattctctgaaaatctagcagcaccaggtagctcacaaattggcaaactttattaaagccccatctttcattctagttcttattgaaattggagttatcactgagtagagggattcattctgattagattctcaatcagaatgaaaatgattaatcagaaaatatacctctctggagaatagcttttattctcaaactattttcaaacatcaaatgcaataatacattacttaaaaatagggcatatcatttccttgctaaattacacatcaatgtttggggtgggaaggttaagcaaaaaaatctttgctttggaaaccaatgcttaaaaacattttgattattgctcctgcatttcttatgttcatatttaacagggagagcctggtgcaatggggttgccaggattagaaggatttccaggtgtaaaggtaagcacagaagttagaaatgtgttcatttattcaacattcaaaattgtttactgagcacctaatgtgccaaaaactgttttaggttagggatatataaaggaacaaaacagacaaaaatgtatgtactcatgggacttacattctagcaaaaggatatagaaactaaaagaataaacattttaaaattacatcttattgttggggctatggaaagaaagaaaaagtagaatgggttaaggaggatcaggaatgctgacggggtaggagggcagtatctgagcaaagacctgaaggaggtgagagggagagccaagtcccctccagtctggaggaataatgttccaggaagaggaaacagcaggtctaaagagtctgagacataagatttcctgatgtatccaaagagaccaggggagggagtgaggagatagtcgtaggagatgaggtcagagaggtgggggtggaggtgggaagtggccttgtcatatagagcagtactactcaatgtatagccagtggagaaccagtgccagtctgcagaccctttgttatgggttcagtggcaaggttattacagagactgagagtaagcacctaaaaacatgtccagtaatttgtctaaaattgtctagcaagcatgtgatggtagaattatctttgttcatgatatgttagaaaataaataaaagattgctcttttaccacaggaagtttgagaaacactaataaaaaggcttaacagctattgtaaggcctttatctttcaatctttgtaaaatgcagagccatcggtgatttctgagtagtggcatgagggaacttgcagccagagagttgcaagggtggaagtagggaagccagttagaagatatccagtaatccaggtgccagttgatgctggctcagatcagagcagaaacagtggagatagtgagaatgcctggatttggatatattttgaaggtagcactgataggattttcagattgattgcattattagagaataaagaggagtcaaacacgaacttcagttttatgacctgagcagtttgcaaaatagggcggacatcatctgaaatgaggacagctatgagcaaggcctattttgaaggggtggaattatcaggagtttaattttgtacgtgagaccaaatttggagatatctgttagacagcaaagtgaaggtattgagtaggcagtctgatataaaagtaaggaatgtggaaaagaagtctaagtggagatataaatttggctgttctaagcatagagatgctgttgtaaagcggaagactggataagattaccaagggaatgccaatagagtttttagaaacagaagagtcaaggattgagccccaaggccctccagtattaggagatcaagaaaaggagcaaagagcaaggaagactaagaagtaaccagcgaggtaggaggaaaacttggtatcctacaatccaagagagaataatgaatcaaagggaaaggagtgatctcctgtctcaaatactgcaaataggtcaagtacaatggagatggggccaggtagaatggtcaagtattgaacattggatttagcaatgtagaggtcatggatgaccttgaccagagaaattattatttcactatatggtaggaacaaccgtggacttgaatgggtttaagagagaacgaggaaaaaaaatagagtcagcaagtcagtataaataatgctgacagagttttgctgcaaacggtagcgaataaataggccagaggctgctagaggaagtagggtcgaggttttataagatagattttgaagataataaaaatatcagactgcttatatgctaaaggaatgactcagtagagagggggaagatggggatgatgatgctggagagaaaggagagagtgctgggccaatgtctttaagtagcctagagggaaggggacctagtgcatatgtggagggtttggcttcagagaggatagtttatctacagtaaaaggggagaaagcagagtatggggacagaggctgataggtgggaagatgtattggatggagtctacaaaagttgttttctgattgcttaaattttctcagataaagaggaagcaaggccattaatctgagagcaaggtagggtaagaggttggggagaaggtccatagttcagggaccacagaagtgtgatgactgctcagccctagggaccctcttgaggttcatggtcatgaactgaagtgagacctctcaacaagactatgtgtgctggcaaggcacagtggctcacgcctgtaatcccagcactttgggaggccaaggcgggcagatcacctgaggtcaggagttcaagaccagcctggccaacgtggtgacaccccatctccaccaaaaattagccaagcgtggtggcaggcacctgtaatcctagctactcaggaggctgaggcagaagaatcacttgaacccaggaggcagaggttgcagtgagccgagatcgtgccattgtactccagcctgggtgatagagccagactccgtctcaaaaaaaaaaaacaaaaaaaacaggactacatgtgcttttccagccatgttcagacattcaggtaaagacacagaataggaggggagttggatttcaacaatgttctgcttttgacggtgagtactggacggaagaatgggaaaagacccttactggcttactggtatacacaagggaatgattctaacaagtaaccatggaattttaactaggcaagagagagggagaggccattgagggagtgaaagataacaaatttgtaccatcaatggattagggtttaggggttcaaggtactcaaagagtgaattagaatgatgtggaatggtggtccaaagttggaacgcatgaaattgagattatggatgggcagcaaatatttttactgacaaagtgtcaggtgtaactatgaaaataagaggtaagttcattcgagaatagtggttaaggaatgagaggcatgagacatgcaaatatttcattgaatgaaaagttctagtatattaattttaaaaatgaaaattttgtaattcaaaaggaacagagggaaattgatgtgtattgcctgtttatgtcctttacccatttttctatcagttatttttttctttttgatgatggctatgctccatacgttaaagacattacttctatctcatgtgttggagttttcatcctagttgatctttgcctttcatttttacgtttaatcttattgtaaatataaccttaatgtagtcaaatctaacactatatttctttatgatttcttgttttggttttatgcacaaaatgacttctacttttattttcaaccaaaatcagaatgtcactaatatattctttgagctcttttataatgtatattattttatttttatataaatctatgtggaattcatatgggatataatgtaaagagaagaagcaaacttttttcaatgaaattatccaattattagaactgtttgttaaataaaatcctattataaatgccggtctgtttctgatatttctgttatagtattttgatatgctgcttaatcttatgccaatattccattatagctttatttattatatgtttaaatgttggtattactagtatctctttattattattcttttaatttttttatcctctcagttattatcccaagtaaactttagtatcatttgatcacactgcaattttgtaagaattgcattaaatttataaattagtttagttagcaatgacacctttacaacattgtcttgctctccaagaacagagcatatctcgtcattcattaaatcaagccttttatgtccctgagtaaagttttttaaattcagtttctgcccccaaaaattgccattttattatcccatatatatagtcgttagtatttttagcattgtcagctttatctaaaatatcacattggctcttaaaaaggagttgagtcactctgttgttcagagcaattcaagggatcttctaattggccaaatgagaactacaaatcattagttgtagatcattttattctaactctatatccaatgagacaaggataggaaaagctttttggaagacactcaaagtgcttaatcttttaagcaagagtaatgatcttttgaacatgtagaataaaaatattgactaatttaactataagtatgtaaggggacattaaaataggtcacagaaatgattatgcttgctttcattaaaactattatttactttagttttatggaaaataaaaaagctgtaacgagttcagttgtcaattagctactcagtttgctatttttccatctacacactagcttcaccccatctaatatcaataacacttatcagatccaaaggaaagctttaccaaatccaaattattatttgagaattaatttcataactaaagacttcattgatgtcattaaagtagcaatgtttttaaatcccaacagggagatcgaggcccagcaggtcccccaggaatagcagggatgtcggtgagttcagattacttcacatcattttcacaggtaaacggttctatctccatgatacacctgtggccagggatcaagacaggcaggagagcataccataactcccatggcattaggttcctgacaattctagtttcataaataatgccacctgtattttccacctccacaatcctctatttcttttgttttgttttgttttttgtcctcttttattttcttcccaagtcactttcatggaggggagaggaaacacagttactatacattaatttatgagcacagctttggaaagtttattgtgtttctctattcttgtcatatttcaaggtttctcagtcttcaaaagacagagttcttatcctcaggcatgtacttcaagttccttgtattaatgcaatctgcctgagttattccttagcccagtgttattagcagagctttattgctgctaatgtttcctcataaactagcccttcaatcctctcaatcatttttgttgctctctggtgtcaaatgttttaatctcatcaaggccttttcaaatgaataggaagtgttccaggaaaggttgaaattatttctctgagccctagagatcattctgatcttcattcatgatgctctaattaaaattttgtggtcacgctttatgaataagaggccatttatcctcttgctaggtgctcctgcagggcaggtccaggataacattacaggaaagtcaatggaaaccatgggcttgtatcacaagaatataagaaagataagataagataaaggccctacaatcaccacccacagtcacccaccgagatctactgacacccaacaccacccaaagccctgctcatctcccactgccatcccacaaagtgctcagagccactctacttcactccattaacttctaacaacacaaaatagagccccatccatcatctgcatccttcgtagatgatgacattcccttacttagccattatagatcaagtcaaatattcgtatgactgtaaaagtagcatgaaaatatcttctttggaaagctcttccaaattttttataaaaggaagtattcttgaaagttgactacacacttaattctattccctcactactgccccactcacagccattcccagcaacatatttggaaatcagtttctggaagtgtccttagagaacctttacaacctgttcctcttatactcacatcctgtgatttgaatttttgtttccttgtgataaaataaagtctagtttttttcattgtgttcacccaggtgtgtctacaaattacattttgctattaccctaaattaagcttatcttctaggaaaaaatactggccaccattgcaagtatttaaaagatgtgcaacagtggccacaggcaatccaaatgagaaattccaaatatgtttttcaaagaggaagcattattgagataaggggctagcctgccacttagttggatgtctaagatctgatatatttactaaaaaagcagttttcatatgtcataattaaaaacattaactggctaggcatagtggactcacacatgtaatcccagcactctgggaggccaagatgggcagaacacttgagcccaggagttagagaccaacctgggaaacatggcaaaactcttgtctctgcaaaaagtgcaaaaattagctgggcacctttagtcccaactgcttggaggctgaggtgggaggatcacttgagcatgggaggcaaaggttgcagtgagctgagatcgtgtcactgcactccaaactgggcaacagagcaagaccctgtctcaaaaaataaaataaaataaaagcactgactgacaattacataaataagaaagggtaaaaaatttacatactacaaacatgttcagttaaagatgcatgttagatttttataactggcccttctgcggctcagaagataaaatagttaaaagaatctagaaatagacaatggtgatggctagatgacagtgtgaatgcacttagtgccacttaagtgtgcacttaaaaatggtttagagggtaaactttaggttatgtatattttaccatgataaaaattttttttcgaaaaatggtgattgttctagttgaagcagggctggggcctgcccacacagagacactggtaactcagctgattaccaaggggacccaatcctgctcttcctagaacggaccggtctatccctttcctgtatattcagggctaaccagggatttcccctagagcttctttctttgccttactctgaggaaagcgtgtgggtttacaggaagaagtgcctgtgagtgctggtcgtggggtggggcctccggtcagcatgctctcccccggatgctctgagttctccactggtcctacctgaccttaggaatgacttccatcaatgtcccttatctctttgtctcagatctcaaggcccgagccctctatacccgccatgtcccacaataagacccttcaggtcattggccttctcagctctaacacatcttcccactcaggcccctaacaacttcagcacaggcaagctgtggggacccagggatgctctctctaacttctgcctgcctagctttgccattcagcaccgtatctctacctatggagggatctccttccggaattctaagcagcaagttgaaaaaagcccatttcttttcatatttctccaaaacctacttggctttttcaggtctcagccccaccacacctacatcccacgtcgtctatctttcccagccacattagaccaagggacaggaggtggttccttctcagaggcaaccaagccttgcctgcacactcaggccttgtgtgcttccagtctccactggaccgtctgcccctctcgtccctcgctgtggtctgtctgctccaggatcggtcatccaagccatggtgtagtgacacaaacttatctgtttcttttcctgtcaacaaaacatggcttttcaaatcaaacatgattttttcaggttgtcatactatgaacttaaaagccctcttgtgaatctcaaagcctagaaaaaaacttatttgatgctttgtgcccatttctccactcccaaagtaaagaagagctgccaggaaaataagcacaagagggatgtccaataatgatgatactttgggctaatattttcaaaaatattctcctctcctactctccaccatccacacaaatatatattcgaagaactgcaccccagtctgaaacttatggcctgcggagttgactatatgttccccagtctctgtccccttagaaatgccactttatttatttatttatttatttattgagatggagtctcactccgtcacccaggctggagtgaaatgtcatgatctcagctcactgcaacctccgcctcctgggttcaagtgattctcctgcctcgggctcccgagtagctgggattacaggcacgtcccaccatgcctgggtaatttttgtattatttttagtagagacagggtttcgccacgttggccaggctagtcttgaactcctgacctcaagtgatccatccacctcagcgtcccaaagtgctgggattccagacatgagccaccacacctggccagaaatgccactggagagcatcacccttgggagcactataaactcaattggggttgggggaagagaagcatatggtgtcgttcagcaatttggctcctaacatttctcttcaatttgccttgccagggaaaacctggtgccccagggcctccaggagttccaggggaaccggtgagttggcagttactttcatgacagttgtacttgtgttgtacttgcatgcagttttaaaacatttgttggcaattaatttgtgtctgtggatgtgtttatagggtgagagaggacctgttggagatataggtttccctggaccagaaggaccctcaggaaagccagtaagtacttcttactacttaaaatatgccacctagagaaatgctctaacattatctcctcatctaccacctcagaaattctgagatttgaataagcagtttccaaggagtaagaagaatgcacagatggatttttgatggcaagggcaggagttcttattgagttccctagatctgtgtgtggtatctttatgtcttaaacagtgttgaaaatggtgagagttttaagtgtcaggaaatctgactcatcatttcttaagcctaatgttctcaacagacttaaagaaaatataatggcctgtcatgtcctaaagtataaagaaaccaaagacttatagatataatacctgtatgttaaaccaaatcctaaagtagaagttattttctcaaatttcctcctttgtatacaggccttgttttcttacactttcataaatcactactggtgaatgtctcatccccttgtgtcctaaaagagctcttggttactgatctgtggtattgatgtgacattgtaacaatcattctgactaatccagttccacataaattcatctagtcactgctgtttgctaagaatgtgctgggcccttagggaggggatctaagatgaataagacagatctcactctcagagttatcctttacagaaggtcactgctgatttgtttgctgtggtgtgtatgggaaagaagtcgaggtgaacaaacagtgcaaaattcaggaagccagtttggcacctctgtgaaaccttcagggttggtggccaccatttcctcagagaagacatgaaaaaaatgtaatttagagtcaggaagatctgggtctgaattatggttgaaaggattttatgagtcacttaagtgccatgacatatggaaagcatttccagtgcctggctatgggaggtactcaataatattagtttcattccctgcctcctcttacctcctcattcccatcccctgcaaggcatatcattaaagcctgccactgagttcccaggagattatgcaaaaagcaatttgttcatcaccaaatatttcttgagcacctcctacatgctaggcactgttctaggtggtaacaactcatagcttttgcattctaatataggaaaacagataaaaacaacacacacacacacacacacacacagagtttcaagtagaagaaggtataagtagagtaaagctctggaatattattcaaatagtgggctcagagaaaatttgcctgcaatttgagcagaaacctgcataaagtgagaagtcaagccatgggaaggtcagaggaccattgtttcaggaaaaagaaatggctaagagagaagtgagcccgatggggtccaggacctcatcaaaaggcatgaagtcaagaatgaacgaagtgaaggaagagttggaaagatacggagggagatgtaggcagtggccagaccatgaagaacttccaagccagggaatgaagtttggatttcatttgaaatatgatggaaatccactggagcttttgtagcaaataatgaaaatgattgaacattttgaggatcactctgatattgtgtggagagtaggctgtagggagtggggtagaggaagacagaacagtaagaaaacatcaccatcatctccacgagaagtaatgacagtggaaacagccatgagtagaggaacttaggatgtacattgaagagagagccagcaagcaacaaaacttgctgatggactaatctagagaagtgtgagggaaagagaccaatcacagctgtggtgtagggtctgagcaactatgtgagagtgctgctgtttggtgaaatggggcagactgaaggtaggtggatttgggagggagagccaagagttctgtttgacatgttcatgatggagcactagcaggtattcaggtggagatgtcaagtacacagtggagacttaggagaggccaagattggtgagaccaattagggtatctaaacctgagcctggaaaagtggagtcactgtggataggaagggaagagagtgcttcaactgttaggaagacaacccaacaaagaaggctgtgaaactgcagccagagagacaggaagaaaatcgggcaagtgaggtttccttgatgtcaagtgaactgttttaagagaaaggagaaagcagtaaggagtgatcaacatacaggtaagtaatatgaggggtaataattctctactgcatcagaaacgtagaggtcattggtgggagagatcaccacatgttagtatcttggtaagaatgatccagttgagagaggaaaatttgatgacacaggagagtgaagactactttgagtagaactggtatactcacaagtgggaattggtcttaactaggaacaggggcagttcacccttcctaactgtggagtgtgggggtgccaaagttggggtgcaaatccatgaagattgacgcaactggtggagggatggtgagaggggtctcttttgtttgttagtgaaagaagaatggaggttgtccaagtgtgaggagtggggaggtgatgctgaagtttggaagagacaggaaaatgtgtgaaagagtacttttggagagatagaaagggagtcaaattgggaaatacagagggatggcctggtaatgctgagggtgctgcttgcaatctgctgttgaacatttgggttggaacaagcgagcaaagatacgtggttttcttcagccaatcagctgctcagatgcagatgtgaggtaggcagaatgtacccaggaaaggggctctgccaggtgaatgagatgagggtagagaggagcaaatacatatgagttattgtaaaaatctctgaaagcagggctgccctgtggatagaaagtaacaccttcctatacaaaagagaacactgatgatagtctttgataaattactggagataaaaaacaggttatagggttacgtattttcttatattgttaccaaaaacatgaactacacttttactctagatttatcttctcttattcaagtgacacagctgtttctttcacatcctctcctaatcagctttatccttgttccttgtgtgtctgaatgtaataaattctttgaaccatacacttcaggtaacatgttcttatttaacgtactctcaataattcccaggatgtttcagaaaggttggcgaactatggttgggttgtcaactgtgacagatttcagcataatttatagcagtgaaaacacgcagttctttgcagttccatcccacagaatccattccagcacaataaaagtcccttgggcttttagaggagcaagtccatgcaattgcctgctggctaagaaatcatattcctcaccttgatcttcctcttcaaatcagatctctaaaacacacttgctgttgggccctgggtatttgatttgacctcgaatacttttccttcttatatctcccagccaatagttctctcagtcttataaatctttaagcaggactaggcttcgttatcacttctagaactcccttttaaagttcaagaaacttccagttttctaataaaaagtgactaatactgtcaaaaaccatgattatacatttcttgcttttctttcatatttccaactgaaaaataacaattgttctctgactgacactttatttcatagtaggatcatgctctggccatgttatgaaatttccccagcagcaactgagaccatttactgagaatgatactctgtgctggaaaacctgttagaaggtaacaaaaatgccatactccagccacctatgccatgaggcaccttcttatttctcaggatgacctaatagaagaataagaaaggaaaataatctttgttgactatttatagaggaccatgcatttttcatgttatttcacttaattcttagttttgaggttatttattttcctcactagtgaagagattgatgctattgaggttaagtaaattgcccaaaaaggttaatgggactagtaagtgacagtgtcagaatccgaactcaggactgtcagattctatttatttgttttccattttaccacctttctttaccaagctctcagtagaaatatgattaaggaactgtcctcgaaaccttatgcttttgttgtgtttaactatgttaatgcagagttagaaatattaatcctttttttctttatagggaataaatggaaaagatggaataccaggtgctcaggtatgggaaatatgatttaaaataaaagttataatgcatactgcatccagaatacctaccaacatttacatcaatcagactgatgaaaaatcttggcaaggagtgattttcatgttgacatctgtttttcagggcatcatgggtaagcctggagacagaggccccaaaggagaacgtgtatgtatattactattgtgattgttattcaagtctgtctgttacaactgtcccatcatttgagttacacaattatgtgtgtagacccctgcaaatcaccaaatctataaaggctagggtgtaggcgatcaaagatctctaccagacattaaatatgacaacggactcagagcaagttatatggtacatctatgtagttggcctttgtacacagccaagtatactttgctatttaaatttgggaagcttttattatcctcctgtctcagacatatatctctactataaccatcacccatgttctttttatctagagtaaggtttctcaacctcagcactgtgattattcaggggcagataattgttgtggttggctgtttgggaattgtaaaatgcttagcagcatctctggccttcatccactagatgcagtagcgccaccatccctccaattgtgacaaccaaaagtgtctccagacatcaccaaatgtctcctgggaagcaaaatcactgcaattgagaactactgacatgcagaaaaactaagtagagtaaagaaggtggtgtgaggggttagagaaatggaaagtgtaactgaaagtatagtgaagttactagtaatgccaattatgttatatggttttgtgttgtttggagcgttaatgtcattattgcaatttctctttatttcctttaatgaacctcaacattttctagtagaattgatttctactagaattaacttctactagaattaatttccactagaattaatagaattaatttctagtagagtcatgccactgcaagaagttactcaaacattgttactcagtgtaattctattaagggttgctattgtatgtgagtgtgggcacatatgtttgtatactggtgtctagttcgctaacttttatttatcattatacaagtaatctataataactgaaggaaatgtgaaaatacagatgatgtaaatttaaaaggaaataaatctaccttaccccactacacagagataagcactgtgatatttgtacgtatttccatctctctcactctaatacataatatacacatatatttatatgtattaatataaacatatacttttccaaaaaggagcttatgctgtcttgtaagtgtcttttttcacctaacgatatatattgatcttttcttgtctgtaaatatagatctatatctaccttttaattgctatatgttattctactatttgaccataccttatttcacttacctagtccgctggacatttggattccttctagttgtcataataataaacatcactacaatgaacatctttgtacctaacttataaaataattttaatatgttaaagattgcatttatcttgcacatgatcagagtattaatcattgatcaaagtgtgctaatattttttcttgtcatctcagaaatttctccaaatgtgagctggagtgacagacctgtatgcagatatatttttataactaagacagtagcattgataccaggcctaagtgcttttatttctttctacatggcttatttccatatctgattctatgatcacacaaatctctgtaactgttcatttatttctgttaatttttaagtcaagagaaattgagtttgcccttctgcagagtagtcatagttaaaagaataatataatgagatacaggaccacttcaagcatcattccgtcatatttggtgtgaggatcacttcctggagttatgcaactgaatatttgaaaatttatgactgaagcaactgccatgatctctctctctctctctctctcattctctcttgcacaaacacatacagtagtagacacattccaggataaaaaacagcatcaagcaaacttcatatcacatttaggcacatctaatataatattttactaattaattatgacatcttattcaactgattcttgtttttttgttttgttttgttttgagacagagtttctctcttgttgcccaggctagagtgcaatggtgtgatctcaactcaccgcaacctccgcctcccgggttcaagcgattctcctgcctcagcctcctgagtagctgggattacaggcatgtgccaccacgcctggctaatttttttgtatttttagtagagacagggtttctccatgttggtcaggctggtctcgaactcctgacctcaggtgatctgcccacctcggcctcccaaagtgctgtgattacaggcgtgagccaccgcgcctggcccaactgattcttccatagttcatttatactattgagtaaatgatgtcagtgacatcctccccccagtcacctgctttgatcttttcaatggttctcccttctcaccatcccgtgggtatatatttagggcacagtgatcacactcaacgtgcacacacacaaacatgcacacacatgcatacacgtgtaaagcacaaatacagaaaacaaacctgaagagtctaataaagcacaaacaaacaggggaaatccaggggtggggagagcacatgatttaggagagattttgaatgtcctgaagtttttttaagtgaaaagtctcagtaatgagatcctcttggcaatcttcctttatcattgcaaaggagacccagacctcaagtgacagctggtattgactcaaaactgccatcatcctagatgggcaaccaagcacacctaacattctctctatcttttatgtattaagtactgccaaggtgccaggcattgctctgagcactttacttgggttaattcatttagttctgaaaatcgccctatctaatggatactattaatatgcccactttgtaggagaggaggctaggacacagagagtttaagttatttatacaaggcccaacagctaataagtgccagtatgaatccagaacttttgctctcaactacagctgatgctagaagagattattctttgttattattttttccttaacagggtgatcaggggattccaggagacagaggctcacaaggtgaacggggaaaaccaggccttacaggcatgaagggggccatcggtcctatgggtccaccaggaaacaagggctccatgggatcccctggccaccaaggccctccaggctctccaggcatccctggcattccggtaagtagtgctaagacgctttagggctcctggcttgtaccgaccatgtatcccttttacaatgaaagcaatgatactgcctttcaaataaataaaacaaacctaaactggtccccgtgagggcaataatagctgtcatttaaagttatgtgccagatcctctactaagcacttactatacattacctcatttgatcttcacaatcattctggaaggattggtgtccttttcagcccagttttataaacgcataaaatgagcattaacttgcccaaggtcacagatttattaagtgggtcagacccaggtctggatggcttcaaacccacgcttttaacatacaggtactgtctctaatgtctccttacactacacagaaaccacatatgcctgtttcatattgctatgaaacatgtccatttcatactctattttgttgaatatcagaacaacaaatctgccatgagtagtgccttgaagtagaaaccacttaggccaagagtgtttagtaaaggaagcccatatctttattaatcctcaagaggagtggtgagtggctattctgcagagaaatttaatctgaaaatatccatgttaggaagaaaggagggtcttgaagtgaagtagggcagttaaagacacattctcctcagataatcaaccaataccagatataaagcaaaactgagcattcatgcaattttcatacttctatatttctgcccactgtcctgaaactctacttgaataaagcctgtgtaacttcactcttggggttgtgtcagtaattggtattagttgcattaattaaagttcattaatgaaatagagcattcttggaattattctgtcctaccggaatcatcactttataagcccatcatattggattttttttatttttattttttgtcattctaagtcagtttgttgttacaaatgaactagcaccattatgttaggaaaccccacaacaatactattatcacatatctacacacagacaggatagaggaattttcagtgaagagcgatgaggaacctacccaagaatgtttataataaattaaggctcactatctaagtaggctctgcttcattcttaaattcacattgcatggtgattttccgtagagcttccaactctctcatctgaccatcttctgttatggtctttgttcatgtttatatctcagagtggggcttattgcctttgtcacaaccgccaatcttcatcatattgtctttaatgccacacatatacccctggataataatcaccaactataaagagtaataaaatactttgaaattctaaccatcaagaaaaaaataatagctcctttaaaaatatcaaggcactataataaaacattactgttataaatgttaaattctttgtcaaatgcatgtggatttacttgtcaacaggtggaaaattcagctgacattatttgcctgcttccttttaccagatcccaattaagaaaagaaaattacttaatacctatatacttgcaatgtgtaaattacagaataaactttatgatgaaatgggtaaaacttgcttttatcccatgaatacaacattttttaaaataatccagcatacttggagttctgttccaggttgtcttcctttgaaaatacattatatcaattagatattgactttgccatccagggattggttaaaagttaaattgtgattaggctactaacatcatgtttatactttttagattatttaaccttataaaatgaagtcataggaatgtcttccctaactgtataaagccatgtgtctccatttaatgggaaacctgttgataccactggttatgatcccagcccatagcttttaaagcaattacacacttcaacttcttcccagaatttggtcaaagcaacagatatttattgcccaatataatcaattgccaaaagcatttttcttgataaatgcatccctacagaagtttcaaataggcaagccaacccaatatttctattctttattcatttgtgctatgctctattttaacaacctttttttttccttcttcaggctgatgcagtttcatttgaagaaataaagaagtatattaatcaagaggtcctaaggatttttgaaggttagattttcttaataacattttcgaatttttcactgattcccacctcccacctactatggggaatccctccagcaacattctcgaaagatggccatgccacaaaaaccttaaggggcagcccattttatgatgggacagctctttgatgaaaattcttctttatacaaagttaacttttgcctccctggaacttcctttcattatacctggtctgtaaaacaacacaggtaaagtacctgcttgtactcacatgacagccctttgagtatttttcaatatccctcatactcctccttagttttctcttttatggagtaaatgtgtctagctcctccactattatcacccctgggaaatgtttaatttataaatgactctcatttaccaaggaatattttgaccaatgcagagtagtgtctttttatttagaccaaagtcagcaaactgtaccccctagccaaagctattgccacctgctttgtacagcctacaaactgagaatggtttttgctttttggtagggagcagtgggagtgagttatatttttaaacggtttttaaaaatcaaaagatatttcatgatatgtgaaaattatctgaaatttgaatttgtttccataaataaagtatgcacattccttcgcctcttttctctggctgttatcccactacagcaacaggactgagcaattgtgacaatatggtacataaaggcttaaatattttctatctggcccttgcagagaaagttctgacccctgctctagatacttcaataattcatcctaagatgtattgctttttggaaaaaagcatccatattattctgttgattcattacgagttttcagttaactaacagccctggatcttccttataaaaatatttttaaatgaggtgtttctcattatggactgtgtgtttattttttgaatctaagtgtgtgatcttatgtttcctcttattaatttcaaatcatttgtgttcatatcttgttccaacctgaagatgtcttttgaaatgttgtctcttgaagagcaggttggctgaccctataactttgtgtcatgctaaatttcataagcatgtcatcattctagctgttgatagaaatgttgactaaaaaagccaagagtcaaggattaggtctttccaaatgccatgggattctttctgtccacttgtaaatcatcttctaatctattgtttagtgagctctgaatccatttcattgtcctaaaactcaccctacatttctttgtctatttgcaaggaattgacagtatcacatgattttgacaaatggtttgctaaaatcaagattactcttctgaactgtaagatttaacaaatgaatccatgttggttctcatggttcctacttcctttgcttagcatccataagccaaaaatagattgttgaatttttttaaggaataagattataagatgccccaagtcgatcttgactccattgcttcaaacacggactcaggtcttctccaaggagtcttgattattttaaataataattagcagtagagactgaaatcttggtgcttggatgcacgttatcttactttatatgagaactagaaatacagtagagtaacactgggacttgtagctactttaatgacaaaacagaaaaaaatggggttttttgttgttgttgtttggttggttggttggtttctgaggagtctcatctgtcacccaggctggagtgcaatgacgcgatctcagcccacagcaacctctgcctcctgggttcaagcgattctcctgcctcagcctccagagtagctgggattacaggcacccaccaccaaacccagctaatttttgtatttttagtagagacggggtttcaccatgttggcaaaaaatgtttttttaaaggtcgtgaatttatgctgttgattttaatttaccttgatcttcactaagtatctttatcttgctctgatatgacagtttactaatacatttgtccactcttttgttgagctaccagtaattttaatgttgcccttaaattttgaggtcttttctttcattctctttcattctttcttcttctttctttctttatttctctctctctctttctttctttgttttttttgacccttgaatcaaacattgtggactagactctaaactttgctttccaaacactcatttccccgtcaggaagtttgaaaaaaaggcaactgtttgaaaaaagacatctcaagctcttcaggggaatactgaagaatatacccatggctacataatttgcggtgttcagtgcacagtgaaaatgctggcacacttgttaaaaaatgattaagaattttaagacagcaatagtaaagccgtaaactaaacatggggccctatgtgactgcataggtagcccggacatgctagtcctggggacaggacatctagaatctcagatagtatccatgcatttagttgacctcaaccatgaaaagagaaatgccagcgtatgtgtatttttgaattgcaatctaaagttttcctttaactcttaatccctatgggctgtagtgtctttatttatcttttatctaagagagctttaatactgaacttcagtctcttaagaggctttagataaaatcatatatttaatagtcagtaattaacccatctttttggaagctgattaagaatgtcagaaaatataaccaagcattttcagaaaaaaaaaaaagtgacatgttgagatatagaaggtgttcgttttacaagtccatcagacactggatgaaggtgtggcccctggcagcctgccctgtgcattcagcaaaagagacacttctactccctcctggggaaggctccgtcctgcccactcccaggccattctgtggctactctcatgaagggctatcagtcttcagaggaggcaggtcaggggagttgggccactctccatctgtgttggggcaggctcaccagacttctgctttctgagaagctcctcctctgggtctggatccttcctctctgagttcctgcccctccttcctctgtcacagcccacctgcctggaagctgacaggtgcagagtcctccccaggtctctggcttcacacccatctctcttactgcgtctctgtctcttccagcctggccaggtccaggtgagtggctggacccccaccagagccagtactccctcagaaaccacaggtgtcttagccttaagacaatattttaaagcgacccataaggaaactattttctgagacttctaaactctaagactccatgtgtgatagccctttccttttgtctctcttgacactagtccagcaaaactgtcttctcccaaacaaaactgtgcctgaaacccagaatttagttatttagcatttaagttaatttgtcccaagatcatttcaattcactccatttaattttccacttagaaatcactttttccatggcttctgaacaccatttacaaaaaagaaaaaagaaaactccattttcacaaatcataaagctccaaggtcacaattaccattttcggaaagttttttctctaaaagcaaagattaattttcacatgttaaaacagttacagttaagtagtacagacagctaactgctacagttaagtagcacccgtctccttctctttttcttagtggtttcacaagagacagtgtcaataacagctaatgctatctctgctgcacgcatccctgcacatctgcagcctcgagagccattgtctccgagcggcaagtcgcagactgtcagcagggactcgaaggagtccttggaagatcctgctctccaactttatcatcccaagtgtccagattacaccctctagtgaaaccctagaccaggatgacccaaactttgggctctcctcttgtggctttttaacccctttggggcttcccaggtgacccacctggtgatacaataccctacaaatctcaaaccttgatctattttccaggccacctaacctcccttcaacatcctggtgccccttcccaaacctaactgtggtggaaagaggtgtcttttcaccaatcccaagtctaggttccagattgatcactatgcacaaatatatatcctctctgaagttcaattaaattcccaatttgattgtccaacaagtcaagtccttttgctagtaaagtgaccacacaggacaaggacagatgccatccatgtgtctcagcttagcatttggctttagaagggcttcccagctgccagtgatgctgcccacgcaaatgaggctcttgccagatctgagaagtttaattcttgctattacactgtcctattatgcttgggaatttacatcaacatgcaggaagaatttaccaacctttgcagaaatgtgtactaacatctggctctctaagttcttgagtcaaacatgggaccaataagcccacacctccagctgtgggagaaaagaaagatttgggctaagtattcccgaacaatgtttctgcctccagatttccagtgttcagaaaatccccttacctatgttttctcgatatgcatttcatacatatatttcatatatatatatgcatatatatatgaatgtgtgtaaatatgtatgatcctattttcttatcccaaagttgtaacatcttttcttacctctctacaactaagatattaatttttatgtatgtgtatatgtacttgttatatacacttcatctgataaatatacatcattgatgatatatatatatatatatatatatataaagagttaaaaaatatattttccaccacatagtctctgtttcttccaatttgcttctttctgtttttttggttgcaactctgttgttcagtttgtaggatttcctcagtgtccagtaatccttggctgtctgcatacataagagcagggttttaaaaaccgattgaaagttgtgagcgaacagtggggcttgccaacctcgagtttcacttagggtagtccagatgggctttttaagtgagggacccttaatttcagtgtctttaagtctttactctcagtctggtcagattctccagtggagacattccatttcctgcctggctgtgagcttagctacttcagattttcagtttggaagcctgagtctcaatggagtctgggctcctccatgcagaggcagactacttacccttttaagataataataaaccctcagtcttttgctagggatggggagaggcacctgcctagctgtatagagaaaggaatttcaacaactactaaaacaggctttcaatcagtgctccttattttagttcccctctttcacccccacttccagaggtaacttgtactgccaattctgagccttctgaggattttgtagtttaggtcaagttattcctctacttctagtctaagagtttagttttcttgcatttgttaagtaatgtatcactcaaccgtctggttcttaacttccaaaattgtgctgctattgtctcctttcatatgctcccccattcttgtctgtttaggcctttaggaggattgttttgctaggattcaggaggtagttaaagcagatccatgtgtttaatccgccatctttacccatgatagttcaaagcaacatactcattaaggtggcaaatgattgagacagagacaagtgaagtagtaaccacctttgggtcataatgaaccacaaaataaatatgaatccaccaaatgatgctgttgaattaacagtgaaaaatgaaactagaatataattattaaaatatcacaggaaattactcttctgatatttttgccctttaggagagaactatatttaattttggtttccacatttaggagacatttatggaaaagccctgaaataatggaaccaaaaggagatttacaaaatagattgtgaagcctatgagtaaaagttatttaacctgaatgctaatatgtaacaatatgactgatttcccaagggaaatactcattaactgctctctgtttccataatggggtagcaaaataaaataaattgaagttataccaagaaaatggataattagacatttccatgggcattaggaggagaagaatttctgtctttgaaatatttacaaattttgtctgtgaaatagaagatagacatgggccagatgacatgtgtgtgttccttccttctctaaaatacgtagtttatcatcatattaatattaatgtctgtattatattaaggagcccattctccaaggaagccaagccttggtctcatttgttagagtgactgctgtggctttgccttggcagatggaaaatgtgtgtttggtttatgcatgcttatatcggaactcttcaattcctgcctcattagaaagcatagccaaaaacattttaattgactgaagatccctgaaaacagaggaaaagcaattaagaataaaggcctttacaattcatctggatgctctgaaacatattattgtaaattatagagcattagggtagggttcagaagaggtaattacccttatgctaaatgactgtttctgagtgtatttcaaagccagataatttacagctagaagtagtgaaaataattttctgttttgctaaaaatattaaaaaccaccaaagtacttctaaactcaattcatatattaaagaggaaaaattagtactgtgaatatttgtgtttcgacattgaaggtatttaaacagacatgtttcaaattaagaaaaattgtgaccggtctcagtggctcacgcctgtaatcccagcactttgagaggctgaggtgggtggatcacgaggtcaggagatcgagaccattctggctgacacggtgaaaccctgtctctactaaagatacaaaaaaaaattagccgggcatggtggtgggcgcctgtagtcccagctactcgggaggctgaggcaggagaatggcgtgaacccgggagacggaggttgcagtgagctgagatcacgccactgcactccagcctgggtgacagagtgagactctatctcaaaaaagaaaaaagaaagaaaaattgtactgaaacacatctcttctttgaggtgcagaacagcaaatattcaaactgtgattattgaatttcatatttattgtaatgccccaagttcataatttgatgtaataaagatattatatgtacattcagtatgatgatttgtaaaactaaaactatatattaattacctatttgttttatctattagttactagaataagatatagtaatatcaaccacacatcccaggtagatagtgaggtagtgatactcgagggcaggtgatttcatatcactccttgggaccagcatccattagatccctgttggcctcccattcatccttcagtctgcagccagagattctagtcctgtgcgggttgtggtatatttccattctgcatgctttgtgacatgagaatgtgaatgtaggtgattacttttcggataatgtcagctaatgctctatagctattggggcttttctcttaataattctatatgaaaaaacaattgtttttctttcttaaccagtatgggcctacattgtttttaaatgattgttttaattgaaaactcatgggaaaacagattttcctcagaagtaatttactctttatttaaaaatttacataaaataaaagatacatatctgtttaagtatgcctttgcaattcaactaaatcaactaaactgaatgaaaagactggagaacatggaagtaactctttacaagacctatatcatttgggctttgtgttttctaactgacggctatcgtttctactgcgttgttgtctgtcatttggtctttacttacaaaataaatactaatttcctcagtaaaaaaaacttttctggaagatttgtctgcaccaaacccagactaaagtttttaaattgaatatttatttcttactacacaaaagtgtctttgaaaaattgtgtgtaaattattttaaaataaaaccatttaaattactaagagatttttgaagaagttatgcaaaaagaaaaagaaaaaacaatgcgattaacttcttgtcatggcaaggatagagcctcctcaggttttctgtttgaaatctagttgttcatatattagattttttaaatgtgaggtatactaaatataaacaaaccaagcaattttaagaaagactccagtgatagattgtatttataatggccttggaatgagttaatgattttaccaaaattaatttcatatagtagtaaaatattcgatatgctttttttagttatctgttgctgcataagaaaatacctccaaactttagtggcttaaaacatttatcttacatttcacattataaatgtttattatctcacattttttatgggtcagggacttgaagtgttgcttaattgtatggatctggctcaggatctctaatgaagttgcagtcaggatgtcattcagagctgcagtcatttgaaggcttgactagggctggatgatctgcttccaagttcatgtgcgtggccactggcaggtagcatcagttcttccccacatgggcctctccacaggacttcttgggtgacctcactccatgtcaactgccttcctccaatgagtgatctaagagagaaagcaactaggaagccacgatgtcttttatgacctcatctctctagttgcccactgttaattcagcctttttcttttcactagaaatgaaaagtctagcccccattcaaaactaggagaattaaactccaactttggaagacagtgtcaaagaattcatgaatatattttaaatcaccacacatacgttcacaacattcctggaaagtgccttaaagttattatgaaatcattttttaatgtgaacctaaactctctccacatgccattaccagaggttagattccatgctagtgttctgtccactagattgttacatctcagaagcactgaaaattctcagactttctgagtgacacagctggtctgcatctatacacaaacaactttgcaatcgatattatttgtctaatcaaaaaactcagcagtcagaccagttggtaaattagatgtgcttaaattaaaaactaaatctttttgtttgtttgatttcatgtattttgaaattttttgacataaaatatttctgttctatgatatattattttttcttctatacatgaagagaggatggctgtattcctatcccagctcaagctgccagcagcaatgttggctgcccaagcttatgggagacctgggccaccagggaaggatgggttgcctgggccaccaggagaccctggaccccaaggtaagtcttcaagtgtaatattggcttattgatttttaactctctgtatttataacatgttagtcacagttaaggaaaaaagtatgtatgtatgtcctttatttatacattacatatataaatatatgcaatatataaaatggtttcatatgtaatctctttataatatttgacattctagaagtagatgtttaactattactacttcaaatttaaaaccaaatgagagttacctggtattctaaatgtattgtaaaaataatatttattataacaataacagcaataatgtgtgcttatatatcattattatctaggaatcttagaattttttaggcttccccttttggtgtaagttaagcaagtctccatcatctgagtgtcttaaataaactggagaaagagttttaggtgactcaacgacaaatagttatttggttctaaaatatatttttaagaaattttagaatctttctgctttgaatacagcttgtggatggtaacttgaatgttaaagaatttttcacatgatttctaaagttcttaaaacccaacttatattggcaaagaattttgttccacttatgacaacttgacgagagacataatcttaagtatagcttaactaaattaatctgacaaggccatttgctagaaatatgattagcaatccagcaaagtggccaaataggcccaggcttagaagagtcaacaactctgaaagggaaatattaaattcagtgaatatatatcatgaaagataagaccaggaaaactgcttcttattgttaaccatggaggatctcaggttccttccttgaaataatcaaaagcaacttgtataaagaaagaaaagtggaaattaacactaaaattaaataagaatgcagtccaaaataatatatatgcaaagaagtgtttttctgtcaccagtttccttcctactgctattctgtaatattgagcctcattttctgaagtgtcccaaggtgactgatgtgcccttcctcttctgaaagagcaacatctgttcagttcccaatagcagtgcctgttagtatatatatcttaatataaccttataacctatgaccatgattgccaagtctttgcgtttaattagcacaatataaaacaggaacagttaaaatctctctagttttttttaaacgatacatatattccaccattatctttagattatagtgaagtttggcagattgatgaaggaaagagaaaagtataggatgagaagtagccctctatgtatacactattgtgtagagggggctaattattatctttcgctggttgggtctattctgaagtcagagtatatgagactggcatgcagatctcaaaagcttatctgaaaatgtgtaatgcctcaagccacgtgaagaataagcagcgttaacaccaataggaagaaaactttggatagatccttcaaacagtggtggtttgagaagacaagaacaatggaaaattgagatgatcaaggaaaacagctctggaactggggtctcctgttccactcaaacacctggcttcagacacctcacaggtgctgcgaaggcccatttggaaggctgtcagtcagaggcaattctaaacccacagtgtcagtgaagcttttggaaacaagccttctgttcaccactccacttgcccttccttttgcaaaggatttctatggatttcatctgctcttgtgcctcaaagatattatagactacttctactcctgatagggcttctggatgcaattcttaaacttggaagatatccccacatgatttccagtttttttgtgaaccaaggtttactaaaattgtcaaaacttttgtctccccattgggtttctgacaacagacatatcttgactacaacttagtatatgtctccttaacctttacataatactttcttttcagtatttgttaaatttgcctaaaatttagcaaaaaataaataaaaattgcaaaacatagaattcatttttaaggaatatgtgtttcttaaaaatatttgtttttaaggaatatcagtacagtaggcatgctgtactgataatcctgcctaaaggcacagagaaatctcactgaaaagaaagaaaatgagaggctgctgtttaatttttggtgcctctagagaagtgcacaggaaattgaagtgtttttctctagtacataaataggtgtgacatgctcagaagatgaagttatacatgtaacttataagctttgctctgctcaatttaagtgtttttttccaaaaaggaaagaaaaaaatgcatttaaaatcaccagtgaccacgcaaacctcggatgctgttgtctgaattagtcctcttaatgacacagcatgactgagtttaagaaagggttgaagtcagaaatgcaacataggttgggaagaaaagatggcttctgaatgtgacacagtgtgttctgccactcattcatcctgtctgatggtggctcctctgaaatttctagatgagacattttgttttgttttgttttgttttcagtgtttgtcaggaaagaaatccatttggttctgaaatacatttttaagaaattttagaacctttctgctaatagagcttgtggatggtaacttttgaactttaaataatttttcttatgttttctaaagtttttaaaaccaaaagttgcttatattggcaaaaaactttgttccacttaggacaatttgacgatatatatcatcttaaatattgcttaactaaattaatctgaaatgtaaaattaaaattaaatggttggtttgaaatgtgcactatggaatgagtcctttattatctttaggaaaggacaaaagtataaaggggtttcataaggtttcctgtgcttattctgagaagccggagacgtatagaaagcagtgagaaaatcgacgtcagactgtgagaggtacacaattcatattgaaaaaaggaagagccgctcctaccaagattctgatcatgaaagcttgaggatccgccttcagcaccctgaccttcttaaagtgaaaagaaagaccttttggattctgagttgcatcacttcatttgcagtttttctaatgtttccaaaggggtgattgtcgatgtcttttttaaattgaaaacatttccagacagcttttagattttagccgtcccatggggttctgagtattggcttcctgctgtgccttgagagaactttccttggtgtccattcccacctggggcttgcagcacagggcctcatggctggttctcccgggtatgagctaaaatgtgccacatcagaataaaagaaaccccaagaagcatgattcagctgagttcccctatataaacaggagaggcaaattttcctaacagacgttattctttcgagtgagttttatgagaaaacacttcatttaaacttcttctcaaacacagctgattctccatcacctattccacccgaggaatagataccacacctaaagccctactcatttcagaaggaaactcacatgtggggtcagtaggaaaaaacagctacatccatcgcatgcaccctgcatcagttccaaaaggacagtagtgggaatagttgttcttacttgtgcacttttaaagtaattgatcatacatactgtttgtaggaagcacttgtgatgtatagatttgacctttcaaatttagtagcattaggggcatttggatatgggaggacatgtgtgtgtgtgtcaaaatgactgaagggcactgctatcaattggtggagtagaaccagggaggctaaacaacttgtaaggcacgaggcaacccctaaccccacccccaccatgcccaccgtaaacaactatccctcctaaaatgccaatagcatccatttactggcctttttccggtatgtatacaggcgcacagatttacaactttagaagtaaatctctggagtcaaaactgaaatcttcctactggaaataaacacagtctaccacctgaaaaactacaccaagcaccaggtttcatcaatgactagtacctctagatgctttcaattaggacactgctggtgttttatttgttttcctacatgagctgcagttttatcaagctgtcatcctgtagaattttttttttttgagccggattttcactcttgttgcctaggctggagtgcaatggccataatcttggctcactgcaacctccgcctcctgggttcaagcaattctcctgcctcagcctcccaagtagctgggattacaggtgcccaccaccatgcccagctaatttttgtatttttagtagagatagggtttcaccatgttggccaggctggtcttgaactcctgacctcaggtgatccacccatcttggcctcccaaagtcctgggattgcaggtgtgagccactgtgccttgcccatcctgtagacttatcgtatatggaaatacatgtctctttgcagatagaccagcctcttccaaatttaaagacaggtccacgctgaagaggtgaaaagcttaattctataaatggggaaagctgttattgaccttgttagcattcctacaaggagttttgttatgaagtaatgataaaaaagaaaaaaaaccctacggctttagggcagccttcataatgaatgagcttgggaccttaataggaaattcaagagtagaaagtacttgtgcaattcagtcgctttatctattaataacaggtaattattaacctaatgaactgagaaatttgtacatggaaattgttacatttgacaggagaagggtaaatgttaccttatgcaaatacacgaatcacagtttcttaatttgtaataccacatgaaccgaaatgcatgcagaataatatatttctgcattatattgcaaatctgagagctgaacttaaatgaaatcgctaagttttagccaatatattcttcatttggaattgcgttacactcttgttaatcctcttattaatcaaaagttcatgtatcttcagttattattcttcctcatatttttagcctgtaatcttaagtacttactgagatagctgaggatcaactttataacttttctgtaatagtgggacctgagttaaactatcaaatatacctcaggaaataaatattattttactccagaaatgtttaagtaatggatttgggagggtggtttcaaatgaccctaagtatatacatttttttcctgctgttcacatacgttaaatgaaagtcacctatatcaaagaaatcctggaaacattttaaatttcaatatagatcaactatggttattatgtcacatgtcaaagccactgttctctctagggtctaggattgtactgaatatctttaacacaattttcaaatataaatatgtgaaggtttcctgctggtgggtgtatttctactatatacttcaaaatatttttaacatatattcttttttccactagtttcacatttatgatcaggtcttacataaaaagcaaataaatacctgtgtggtgattacattgccaatgttgttcagataataatgtgtacattgtatgacctagtcaaagtgaaaatgataacccctgctatctaaaaactgctatctaattctcaacaataatgggaaataattgatcatacatactgttcatagggagcattacattttctcctcctgccatgttctactgtaacagcacacctttatgaaaaggcacaactaaatcacagcctactgtttcctactgagatgctctcctactgatatctttgctgtgtgtccacatgagtctgcatggctgctctgtccatttaggacaaggagtgatctttaaggggctgtttaagtatgaaaaagttggaaataaaaactctatttgccatcactgtgaaactcttacagcatggaaccttttattcaaacaaagtattacatgggtgccaatatataaaatgcagataaaaatgctttatgctttttataagcagggataatgacttccagagacacaaatttctctgtactcttgtagctcagccaatagcaagcatattagatagtaagaataattttgttttaaaatatagacagatcttagacctaattcattttggttaaaatatcttaagttgatgaagtacatttgggagactgtcagtctcctctcttgtttcctagctttgctgaagctcctttggagttatacactgccatgttcaaacatggggtggatgtttaaacgttacttagagaagatataatgtttatagttgatcatttgaacacagacctgactttttagatgagttaacccacatatactcatgctcttgctatcatctattagaatcttgaattatttgttcctttcatttcctttaattcttggaataagatccgtattcctattatattatcttgttctcattttaagcaagactctttccatatacttctttcatttagcctataccttgccttcaatcagaattcctactgaagagggctcacacagcttgtcatagctatttgcaagattgatttatttaggtgtcattttcagagccaaaatctcgctatcaagagtataactagttggggctgggcatggtggctcatgcctgtaatcccagcattttgggatgccaaggcgggcagatcacctgaggtcaggagttcgagactagcctggccaacatggcaaaaccctgcctccactaaaaatacaaaaaaaatagccaggagtggtggttgagtgcttgtaattccagctactcaggaggctgaggcaggaggatcacttgaacacaggaggtggaggttgcagtgagccaagataatagtgccactgcactccagcctgagtgacagagcaggactctgtctcaaaaaaaaaaaaaaaaaaaaaagtttgactagttggaactttttatagtaattgcatgttttttaagatcctcattgccctattatacccaatctgtttgatatgtaagtttaatatgtggttaatgcaaaacagttagctaatatactatttattttaagcaaatgtatcacataattatcacagactcagaaaatggttcttctctgtgctgtgttgccatagaaccctttttgtgtgtctcttttttatatatttctcacttaggctacagaggacagaagggagaaagaggtgaacctggaattgggctgccagggagtccaggtcttcctgggacttcaggtaagtgggatattgtcttcacaacacaagcaagcctttacaaattagaaccatgcttctcccctagggtccttatatgtcaagtcgagtgatccatgttggctagagggtgggagagaggaagggccatatgtgatctgcattgtaattttttttttatgtcgttagctctgggtttgccaggctcaccaggtgccccaggcccccagggccccccaggacccagtggaagatgtaacccagaagattgcctctatcctgtgtctcatgcccatcagcgcacaggtgggaattgaacacacctgaagaagacttggttcctggtaacatttccttgccactggagctctcttaataccgtcaaaccctcatcatctgtgggttgctttttttttttttttttttttttgggagtaagccaggcattaaaagcaaccgtttgaatcctattcctatagcaattgcaaatcagcattttttgatttttcccaaattcattccatatgttttgctttacaattgctatgatttttactcagagttttatatgaaatatgcaagtaaatcttatcgttagttcttcttcaaaaggaaattgcatcttgtgacttagtagactgatgatgatatccattttgtagactcatcaacatgtggttggcctttgatttctgaattttaaagtttcagacttatcttttccttggtgtttaaatttactatcattgctaaacatctcgtcaacttttttgatatagtgcattgctcctgttgaatgttttttgactactttttataacttaagaatttttataccatctacatctatcctacttatgcagaaaaataggcaataagaacttcattttacaatttatgttttcaaaaaaaaaatgcaggaaactgttttatcagggagcccaaacacccagcatagccaactactgaaatgattttgttaattctgtataatgagctcaattcaaagcaatcaccactggcatgaataagtactgcgtgaaaagggagtatcaaattccagttttgtatgagttctgcaaaaaaagcctaatattctgtggtcccctcactcagtctctcatttggtaaacagaaagctgttttccctacaaggtgcttggtggtgaagccaccaagctgtctttggtactcttaaagcttcagtggcctagcaagatctttgggcccttgtatccattatccttatgacctcatcaccctcagactttaagacaagaagccaccatcaaaacaaaggatgggatacgtaaagaatggactcacttgtcctagaagatgaatgtgtagtgtcagcaaatgcatgttaagaaggtgaagcccaaaagctcttaaggagaattgtatttctccagaagctgcagcaagaggtacagctcaacaaaggaaaaccacaggactggatatgcaactagtgctcagaccaaagagttcacacccactctaaaaccatgtcctctgaaaagaaacaaaaatacagtgatcatcaaatgcctaaacagtctttctgttggttagctgtacattcattgaggaactgttgattggcaggcactgattctctagaacactgggcatgaggatgttgcagaaatctagatggtgggtcccacagatgtgagaacatgctgcaagagcctgccagccacagcaatcaggactcacagctcttcaaggagcagtgcagatttcaatttggctaaaacaggatgattgcttttgtctgtttactgaaaaatgagtttagaaaggctagcccactgacattggaaaaagctgtgaacagagttgtgtctgaggaatgtgcctaatttaaggcagggtttgttccaatgcatccgtgatttgaaccggttttcattatagattaatgaactgctggtcaggtactgtctacaatggctgtgcatacctataacattttaggtatttcatattgaattatgctgtatatttcaattccaagtttatttattttccaaggttattttatttattgtaagcattttgacattgattttttttttttcgttttctttcttgtgcaatacctacaatggtgctgtgttttaaacttacacaattgggacatacgtatgtgttttcttagtaaaatggtaatttatcccgaaaaagtgtacatagatctaaaatttggtgctatgtgtatatcttgagcttttaatttgttgaattttctaaacgcttacaacttatctgccactcatattaatttacttgaatttgtcataaagctaaatattttatatgttttcaaagattattttttcatattaataggttgtttatctttttgcctgtttgctaatttaaaaatatttattttatcattttaatgttttcatggacttttttgctgatggtaatcaactttttttgttttttggtttttgagttgttcttgtcatagacataaaaagacaattcattttcttgttttattaactctgttcatttttattctacaaaatatgtcatgcattctttcttatgaattgtatatttagaaatctttctaaataccattaaggcttgactggttaattcctatttcaaggatttggatttattcaggtaatttgatgggatggggaaatataatattgtgtgatgcatattacaaagtggacttgtcacaatgacacaaactcattttttgtaactgggaaatatgactaaatttgacgtaactagagaaacaaggctgtatccacatggtacaagcctttctcaccctactctattatttaccttcagatactttttcctgcctcagctctgtacacatgatatgcaacaaagggcagcaagaaatgctgggtccacctaatttaacacaaaatgaagttgagattcggcagttgcccaattcctttaataaaaagaaactaaataatttgggccccaaagtagggtgggaagttttcctctaaatgacttgatggttgccaaatcccttgcaccattttattccattccaaaacatgtgtttatttccacatagatgttaatgatgttcaaagcaggggagaagaattattcaatttcatgaataactcttgtttgcactccagaaaacaacatacatgtttaaatacaaaataattatgggccatgacgacgattaatattaaaactgtgatttccatatacaagtatgtttgagttccaatcttacattttataccaagttcaaaacactttcagatagaagtctttctatgcaaagattaaagtatgacttcaattcatatttatggcctttggaatccaaagaaaaacagaagaataattcatggatttgttcattgttctttccaactgaaggcagtaaccattacttctaaccgtaacacaaacacagcaagttttaaccttttaaacttttcactttgtgagcaaagtaaccccataagtttatttccctatttcatggtattgtttaaactttaaaattttagtcacttaaagaacttaagcaattatattaaaatacgttgtctgtgaaaattatcatttgatatttggcttataaagtaatttttatgaatctgttttatgagttaggtaagatttagcctttctgcagtctgtctcatctgttgggaacctgtgatatacctccatttgtccacaagatggtgtttaaaacaatttgttcagaagaactgagcaaactaacagaaatacaaggctacgaacagtttagtggacaactaaatcagactcttgcctttgcacttttttttaacttttgtagataatttttgttaatttgttttgttaatttatgtttttcctaattttaagcatctttatgaaacaggcacagtaccctttggtttgttgactgttttgattttatttcttcggtggatatatatgtacttatacacttagttaacatgcagattaactagtcataactgtttatacaccactctcatattttagtgatcaatatgaagacagctaaataattatcctactttttagacaggacagatactctctttcaacagacaagaaaaaagatttagcttatcacaagaagcagacaatttataaaactacacaatgtctaaactctatgttgctcagtgtacttaaaattttacagttatatttgtataacgtttatatttttctagaatacatcactatttacaaaagtacgattagaaacactgttttttttaagtaccgtttttattttcgtaacactaataatacactgggattgagaatttctgttaagtgttttgctgacgttgttttaatgaatactcaaaaaagctttgcagatttgtccattgctcttgttcttaaattatttttcatacttgtctgtatccaccttctgaagacacacaagtgtttactgtcgcagtttcccagcgttatttcttaatacttgagtgttgacacatttttgtaccatcccccttttgtaccatctctgctcacaaagattatatgcaggctttgaagaggaggagatgcagaagataattgaatttgtatcttgtatgcctatgtaattcaaagtgacttagtccattgaattgtgttcatttattagttggctggttaagatagcattaattatcttaaatttattcaactactaaaagtctcaggcaataggacagatgagtgtcatcatttttattgtgtggcatacttggagctataatccaaacgttttactcaacaaaataatgctagagtaactgatcaatttggttaaattgaatgaagaaccaagtgaacacagagaaaacttattcggacaagtagacccagcacagcaaaaatttgtctgaaagataagacaagcttataagaccaaagctaagtctaagaaaatctaaatggaaaaaaaattgcgtgttcagatccaatagtgagtgatgtggtacaactggaggagttagctacttgcttcatgaatttgtcaaaagtgaatactaataaagtgggaggcttcactaaatgagggggtaaataagatttaagtttatcagaagtgtgtgtattgtgtgaccatactaagcttctgggtgtaagtaaagatgctggctattttacaactttttattgtattgtgttatgcaaagtacattttggagataaatgtttttcagcacattaatgtctttaaattcaggttgtattgggtgtattttacaactatttatttttaaataacatttagggtgtgttttcccccattttgtttgttctctatcttacctcatcaaactctttacgatttaattgaatatactcatgttaagtgcaatggcattagttttattcaaaatcccacatgggcataatgctttgaggccttgattcctacatgttcattatgcataatgagcttgtcacctatctcagcaataaaggttctgaccctatgtcagggaaatctaaggtgcaattattaaggccatatctactcttcatcacttgccatggctgaagctccacacttcagtccattttgtttggtgtcaaccatggggatgctccagaagcactcttggctaaccatgagccccacaggtgtccaaggaacgttaattggtctattgcagggttcatgtttgtaccatcattatagttttctttgtcacatgaatcattgctcagcttgaaataatcaagtttgtcacccatctccctggcagttcataaaaagcctagtctaattatttcagatgagaattataagcagaatcaaaagcccaaaagcaggcagtcctttgggacttttgtcccccagagtgatcatctcactaaaatcatttgagactttttgctatagaggtccctgagggagataagaaataacacaattaacttttctcatccatagaagcttttacaccatgagtgataaggtaataggcaataagtagttaaatacatagcaggttttcttaacagaaattaattgcatcaaaacgtgccagaggatttatatgtttacctataccgggtaataacttacatagttcttaactattcctatcttcaggccccctttggataaattaactaggtgctctctaaagaatgttgttgtcttttcacacacatattttcaacttaagagacaaaatggaatttcaaatatatctcagaaagagaggtaatttgtttgagacagtttccctcccttgttctctctccagctatgttttgataacttggagtcaaaagtaatttgtgaaggcatgttaagcagagagttagcatgaattgccatttattaagactaaaagtaattttcagttagcagcatcctcttcctgatagccagatcaatcaaatatgttacacttcctctcgttgatcatttaaagagcacttaagcgtgtgtatttacagacaggcattactacagtcagcccattttgatttaatagttcttgagccataggtactttatactgccatgtcctggatcacaactcactaaagaaggctacacaattgaaaagtatttattttactttgcacaaaagggcttgacctatgtttattgaacacaagtattatttttaaaaagatatttaaaatcatttatgtttgtcacccctctataaacagcaagattgctagtttgctagtattttttccttaatactgagttttcactccttttgccaggttaccagcaaatatttttaagtaattttcttgatatttggaaatcagaatttctattggttttccacctatgttggtttacttagtttattttagagacagggtcttgttctgtcgcccaggctagagtgcagtggtgtgatcatagctcaccatggcttcaaactcctggtctcaagcaatcctccaacctcagcttcccgagtagctgggactacaggtgctcactaccatgcctggctaatttttaaatttgtttttatttttacagagacaggagactcaccgtcttgcccaggctggtctcgaactcctgggctcaagctatcctcccaccttggcctttcaaagtgttgggattacaggcgtgagccaccatgcccagccttggtttacttttaaactcagagactgtatctcagaaacactataatcaccaaaaaattttaaaaacacaatagaggtgatcttctacagcaggaatttatattaagcttatttcagttggcaaataaatcagattttactaatgatgtttaagaatagcgatattggttcagtcagcttgaaatgtaaagtatccaaataatcaaatcgatcacctatcctgatatgactactcattcatattcttctgctgtgcagaagccaattacccaaaaccatgccagggaatttatgtgctcagtcagtctcggaagtgatttccacagttcttaaccaacctgtcagctattagggttgaaaatcatatcatactgccatagaagcaccggctagaaataaatcaggaatcatttgcccttaattaacatgccaggttcaaaccaactttatttatttacactctcctctcccagtgagtgctctagttgccactttatccaactttcaaaaatatctcagagaggatttgagatttctattttgctagagagacatgcttggtcagattcaacatttaccaactctctttcatggagggaatttgctgggctcttttccttgcaatttctaagccaagtgtcttctgcttctgtaaactacttcacttaactgaaatttataacgaattcttcctgccatttggaatgtggtagttttgcataatctatttgtaagtgcttgtttccaatgttgctgactgtatctgtggagcttgttgtacaacctttacataaccaggtttgtaaaacagttgagtgaactgttctttgaaattttattttttttaattttcttatgaatattataaaacttagaaacatgtttgattatctaatttttcttttattgtatttgattatgtcactctagttaaaataaaagcactttggtgaaaagataatttctatgcctttatttaattatgtgtcacagctcctgaaaaagtttgccatttttttaaggattgttttagggagctataacagagacctttattttcaaaagtcatatttgaaaaaagggaaagaacattctttcagtctatgtaaatagcactgatctatatggcaaagttggaatcttcttaagcaaaattcatgctagaagcataaaactagatgctgtaagcagttttaaagaaatccaaatacagattacataatgattgatttaaccaaacaactaggactagaatttaaaatgtataaaagtacacacgagaaaaatatatataaaaaattatattagggctcactctcctttgacttgacagaatttagttccataaactaactaaagatactatgttgagctattgttttatgccccagcacaggttactcacaggctctgtgatataaaatgaatatattaagtctgttggatagttaagtagatgttaatgaaacagcaagccaatatgattacacagataataataaagtgcttaagtggtcaggaaatacttgttaagaatacagtgctttagctgagctgcatttataaaatttacaagaaatggtgaaacataaatcatgtttacaataaagttctgagtaggagggagctaacaagccattggaatgaaggcagtggttcttaacctagaaataaagcaaggctagacttaaaaaagtccacgaaatctctgaaatactatacaaaaatatagatgcgcatgcagctgcacatctttctagggaattaacatttcgaaaaggtccatgaagctctctccatacacactaaaaaacacacacacacacacacacacacacacacacacacatacgcatctgtcacagggtaacaccctctgtggaacagctttttaaattactttatgtagaaaaaacactaatattataaacatacacctatagaaccagtagttaagtaatgtttaatgtatctaaataagctcagtaacttcttttcattgaacatgattatttataagaaaacatgcaagagattaagaaaccatatttatttcttctttggtacaaccagagatgttacctcaaacctttaaaataaataatctcatcaataaaatttatgaatgccagagtattaaaattatttctttgctttcacatagaagcgctcaaaatattaacaggtttggggtaaagtacatacagttcaacaaaagttcaaggtgaagaaggaaaccaatacatgacgtaaagaaatcatttcgggagatgtagccctttcttatcactccagagacagcacatcgatgagattttaagcaccaattccattgaatgtagtggggtttcttcataactagtctagtaatcctctatataactgaaacaataatctgagaacaacttctaaatgaaaataactactgcaactgaggtaaaccaaacagttgtttttgtttattggcacagtggcccacgataagacacataggtatagcacactaaagctcaagatcctgggaacaggagtataaatttattcaagggaggtgtttggttttctttttttttttttaactgatgactctgctgtcttccctccaagggaaaggaaagagaacttactgaatagcaccgttcttctatatgtgattgtcaagtaggacttctgtaatcatactgaaggtaatacattgtaatcatgctgaaggtaatcatctttgccccagctttggatggtgtttctcacccaggctccttcaccaggcgtggttcatgcagacagccatgcagcagtaagcctttcaagggtcaggccctttgttaaatgctcgctgaccagcctgcatggtgcaggaggctggctcacagaaaccgggaagcccaggaggtcccgggggtccaggcactccaggaattcctgccacccctggggggcctcgctcaccgtctcggccatttctgccatagctggcagggcctgggtcacctgaaacacacagaagattgcacatgtgaacaggagaatcctcattgatgcaaactggcagagggcatggctcagcagcgctcagataaggggtttaacaaacgcttttggaaacgatggatgatgactggtgatgattggtgatgatgatgatgatgatgataataagatcccttc

SEQ ID NO: 1172 - DNA, 3429 bp, Homo sapiens
atgagactcactggcccttggaaactttggctttggatgtcaatatttctgcttcctgcttccacttccgtgaccgttagggacaagacagaagagtcatgccctatcctgagaatagagggacatcagctgacatatgacaacataaacaaacttgaagtttcaggttttgatctaggagacagcttttctctaagacgtgcattttgtgaaagtgataaaacctgtttcaaattgggaagtgcacttcttattagagacactattaagatatttcccaaaggccttcctgaggagtactcagtagctgccatgtttcgagtacgaagaaacgccaaaaaggaacggtggtttctgtggcaggttttaaaccagcagaatattccacagatttctatagtagttgatggtggaaagaaggtggtggaatttatgtttcaagccacagagggagatgtgttgaactacatttttagaaatcgagaactccgtcctttgtttgatcgtcagtggcacaaacttggcattagtatacaatcccaggtcatttcactttatatggattgtaatttaattgcgaggaggcagactgatgaaaaggacactgtggatttccatggacggacagttattgctacgcgagcttcagatggcaagcctgtggatattgaacttcaccaacttaaaatctactgcagtgcaaacctcatagctcaagaaacatgttgtgaaatatcagatactaagtgcccagagcaggatggctttggaaatattgcatcatcatgggtaactgctcatgccagtaaaatgtcttcatatctgccagcaaagcaggaacttaaagaccagtgccagtgcattccaaacaagggagaagcaggattaccaggagctccgggttcacctgggcagaaagggcataaaggagagccgggtgaaaatggtttacatggtgctccaggattccctggtcaaaagggagagcaaggttttgaaggcagcaaaggagaaactggtgaaaagggtgaacaaggagaaaaaggagatccagctctggctggccttaatggagaaaatggtttgaaaggtgacttgggtcctcatggtccacctggcccaaaaggagaaaagggagatacaggacccccaggaccaccagccttacctggttccctggggatacaaggcccccaaggtccacctggaaaagagggtcagaggggaagacgagggaaaacaggacctcccggaaaaccaggacccccaggaccacctggacctcctggaatacaaggaatacaccaaactcttggtggatattataacaaggataacaagggaaatgatgaacatgaagctggaggcctgaaaggagacaagggtgaaactggactaccaggatttccagggtctgttggccctaaaggacaaaaaggagaacctggagagccttttacaaaaggagaaaaaggagatagaggagaacctggggtaataggatcacagggagtaaagggtgaacctggagatcccggaccccctggtttaataggaagcccaggactaaagggtcagcaaggatctgcaggctccatgggacccagaggaccgccaggagatgttggattgccaggagaacatggtatcccaggaaaacaaggcattaaaggagaaaagggagatccgggtgggatcataggccctcccgggcttccaggtccaaaaggtgaggctggtcctccagggaaaagcctgccaggggaaccaggattagatggaaatcctggagcacctggtccacgtgggccaaagggtgaaagaggacttccaggtgttcacggttccccaggggacataggcccacaagggataggaattcctggcagaacaggcgcccaaggaccagctggagagccaggtattcagggtcctcgaggtctccctgggttgccaggaactccagggactccagggaatgatggagttccagggagagatggaaagccaggcctgccaggccccccaggtgacccgattgcacttcctctcttgggagacatcggtgctttgctcaagaatttctgtggcaactgccaagccagtgtcccagggctgaaaagcaacaaaggagaagaaggaggtgctggtgagcctggaaagtatgattccatggcccggaagggtgatatagggccacggggtcctccaggaatcccaggaagagagggaccaaagggaagcaaaggagagcggggctaccctgggatacctggggagaaaggcgatgagggtcttcaaggaattccaggcattccaggtgctccaggcccgactggaccccctggcttaatgggaagaactggacatcctggtcccacaggagcaaaaggtgaaaagggcagcgacggaccccctgggaaacccggaccacctggaccacctggtattccatttaatgaacgaaacggcatgagcagtttatataaaattaagggaggtgtgaatgttcccagttacccagggccacccggtcctcctggcccaaaaggcgatcctggcccagtgggagagcctggtgcaatggggttgccaggattagaaggatttccaggtgtaaagggagatcgaggcccagcaggtcccccaggaatagcagggatgtcgggaaaacctggtgccccagggcctccaggagttccaggggaaccgggtgagagaggacctgttggagatataggtttccctggaccagaaggaccctcaggaaagccaggaataaatggaaaagatggaataccaggtgctcagggcatcatgggtaagcctggagacagaggccccaaaggagaacgtggtgatcaggggattccaggagacagaggctcacaaggtgaacggggaaaaccaggccttacaggcatgaagggggccatcggtcctatgggtccaccaggaaacaagggctccatgggatcccctggccaccaaggccctccaggctctccaggcatccctggcattccggctgatgcagtttcatttgaagaaataaagaagtatattaatcaagaggtcctaaggatttttgaagagaggatggctgtattcctatcccagctcaagctgccagcagcaatgttggctgcccaagcttatgggagacctgggccaccagggaaggatgggttgcctgggccaccaggagaccctggaccccaaggctacagaggacagaagggagaaagaggtgaacctggaattgggctgccagggagtccaggtcttcctgggacttcagctctgggtttgccaggctcaccaggtgccccaggcccccagggccccccaggacccagtggaagatgtaacccagaagattgcctctatcctgtgtctcatgcccatcagcgcacaggtgggaattga

SEQ ID NO: 1173 - protein, 1142 aa, Homo sapiens
MRLTGPWKLWLWMSIFLLPASTSVTVRDKTEESCPILRIEGHQLTYDNINKLEVSGFDLGDSFSLRRAFCESDKTCFKLGSALLIRDTIKIFPKGLPEEYSVAAMFRVRRNAKKERWFLWQVLNQQNIPQISIVVDGGKKVVEFMFQATEGDVLNYIFRNRELRPLFDRQWHKLGISIQSQVISLYMDCNLIARRQTDEKDTVDFHGRTVIATRASDGKPVDIELHQLKIYCSANLIAQETCCEISDTKCPEQDGFGNIASSWVTAHASKMSSYLPAKQELKDQCQCIPNKGEAGLPGAPGSPGQKGHKGEPGENGLHGAPGFPGQKGEQGFEGSKGETGEKGEQGEKGDPALAGLNGENGLKGDLGPHGPPGPKGEKGDTGPPGPPALPGSLGIQGPQGPPGKEGQRGRRGKTGPPGKPGPPGPPGPPGIQGIHQTLGGYYNKDNKGNDEHEAGGLKGDKGETGLPGFPGSVGPKGQKGEPGEPFTKGEKGDRGEPGVIGSQGVKGEPGDPGPPGLIGSPGLKGQQGSAGSMGPRGPPGDVGLPGEHGIPGKQGIKGEKGDPGGIIGPPGLPGPKGEAGPPGKSLPGEPGLDGNPGAPGPRGPKGERGLPGVHGSPGDIGPQGIGIPGRTGAQGPAGEPGIQGPRGLPGLPGTPGTPGNDGVPGRDGKPGLPGPPGDPIALPLLGDIGALLKNFCGNCQASVPGLKSNKGEEGGAGEPGKYDSMARKGDIGPRGPPGIPGREGPKGSKGERGYPGIPGEKGDEGLQGIPGIPGAPGPTGPPGLMGRTGHPGPTGAKGEKGSDGPPGKPGPPGPPGIPFNERNGMSSLYKIKGGVNVPSYPGPPGPPGPKGDPGPVGEPGAMGLPGLEGFPGVKGDRGPAGPPGIAGMSGKPGAPGPPGVPGEPGERGPVGDIGFPGPEGPSGKPGINGKDGIPGAQGIMGKPGDRGPKGERGDQGIPGDRGSQGERGKPGLTGMKGAIGPMGPPGNKGSMGSPGHQGPPGSPGIPGIPADAVSFEEIKKYINQEVLRIFEERMAVFLSQLKLPAAMLAAQAYGRPGPPGKDGLPGPPGDPGPQGYRGQKGERGEPGIGLPGSPGLPGTSALGLPGSPGAPGPQGPPGPSGRCNPEDCLYPVSHAHQRTGGN
